United States Patent Application Publication US 2015/0232836 A1 - sequence listing, part 47

SEQ ID NO: 1882607 - DNA, 15 bp, Homo sapiens
gtactattgcagtga

SEQ ID NO: 1882608 - DNA, 15 bp, Homo sapiens
tactattgcagtgat

SEQ ID NO: 1882609 - DNA, 15 bp, Homo sapiens
actattgcagtgata

SEQ ID NO: 1882610 - DNA, 15 bp, Homo sapiens
ctattgcagtgatat

SEQ ID NO: 1882611 - DNA, 15 bp, Homo sapiens
tattgcagtgatatg

SEQ ID NO: 1882612 - DNA, 15 bp, Homo sapiens
attgcagtgatatga

SEQ ID NO: 1882613 - DNA, 15 bp, Homo sapiens
ttgcagtgatatgac

SEQ ID NO: 1882614 - DNA, 15 bp, Homo sapiens
tgcagtgatatgaca

SEQ ID NO: 1882615 - DNA, 15 bp, Homo sapiens
gcagtgatatgacag

SEQ ID NO: 1882616 - DNA, 15 bp, Homo sapiens
cagtgatatgacaga

SEQ ID NO: 1882617 - DNA, 15 bp, Homo sapiens
agtgatatgacagac

SEQ ID NO: 1882618 - DNA, 15 bp, Homo sapiens
gtgatatgacagacc

SEQ ID NO: 1882619 - DNA, 15 bp, Homo sapiens
tgatatgacagacct

SEQ ID NO: 1882620 - DNA, 15 bp, Homo sapiens
gatatgacagacctg

SEQ ID NO: 1882621 - DNA, 15 bp, Homo sapiens
atatgacagacctga

SEQ ID NO: 1882622 - DNA, 15 bp, Homo sapiens
tatgacagacctgag

SEQ ID NO: 1882623 - DNA, 15 bp, Homo sapiens
atgacagacctgaga

SEQ ID NO: 1882624 - DNA, 15 bp, Homo sapiens
tgacagacctgagaa

SEQ ID NO: 1882625 - DNA, 15 bp, Homo sapiens
gacagacctgagaag

SEQ ID NO: 1882626 - DNA, 15 bp, Homo sapiens
acagacctgagaagg

SEQ ID NO: 1882627 - DNA, 15 bp, Homo sapiens
cagacctgagaaggc

SEQ ID NO: 1882628 - DNA, 15 bp, Homo sapiens
agacctgagaaggcc

SEQ ID NO: 1882629 - DNA, 15 bp, Homo sapiens
gacctgagaaggccc

SEQ ID NO: 1882630 - DNA, 15 bp, Homo sapiens
acctgagaaggccct

SEQ ID NO: 1882631 - DNA, 15 bp, Homo sapiens
cctgagaaggccctc

SEQ ID NO: 1882632 - DNA, 15 bp, Homo sapiens
ctgagaaggccctcc

SEQ ID NO: 1882633 - DNA, 15 bp, Homo sapiens
tgagaaggccctcct

SEQ ID NO: 1882634 - DNA, 15 bp, Homo sapiens
gagaaggccctcctt

SEQ ID NO: 1882635 - DNA, 15 bp, Homo sapiens
agaaggccctccttt

SEQ ID NO: 1882636 - DNA, 15 bp, Homo sapiens
gaaggccctcctttt

SEQ ID NO: 1882637 - DNA, 15 bp, Homo sapiens
aaggccctccttttc

SEQ ID NO: 1882638 - DNA, 15 bp, Homo sapiens
aggccctccttttcc

SEQ ID NO: 1882639 - DNA, 15 bp, Homo sapiens
ggccctccttttcct

SEQ ID NO: 1882640 - DNA, 15 bp, Homo sapiens
gccctccttttcctc

SEQ ID NO: 1882641 - DNA, 15 bp, Homo sapiens
ccctccttttcctcc

SEQ ID NO: 1882642 - DNA, 15 bp, Homo sapiens
cctccttttcctccc

SEQ ID NO: 1882643 - DNA, 15 bp, Homo sapiens
ctccttttcctcccc

SEQ ID NO: 1882644 - DNA, 15 bp, Homo sapiens
tccttttcctcccca

SEQ ID NO: 1882645 - DNA, 15 bp, Homo sapiens
ccttttcctccccaa

SEQ ID NO: 1882646 - DNA, 15 bp, Homo sapiens
cttttcctccccaag

SEQ ID NO: 1882647 - DNA, 15 bp, Homo sapiens
ttttcctccccaagc

SEQ ID NO: 1882648 - DNA, 15 bp, Homo sapiens
tttcctccccaagca

SEQ ID NO: 1882649 - DNA, 15 bp, Homo sapiens
ttcctccccaagcag

SEQ ID NO: 1882650 - DNA, 15 bp, Homo sapiens
tcctccccaagcagc

SEQ ID NO: 1882651 - DNA, 15 bp, Homo sapiens
cctccccaagcagct

SEQ ID NO: 1882652 - DNA, 15 bp, Homo sapiens
ctccccaagcagctg

SEQ ID NO: 1882653 - DNA, 15 bp, Homo sapiens
tccccaagcagctgc

SEQ ID NO: 1882654 - DNA, 15 bp, Homo sapiens
ccccaagcagctgca

SEQ ID NO: 1882655 - DNA, 15 bp, Homo sapiens
cccaagcagctgcat

SEQ ID NO: 1882656 - DNA, 15 bp, Homo sapiens
ccaagcagctgcatg

SEQ ID NO: 1882657 - DNA, 15 bp, Homo sapiens
caagcagctgcatga

SEQ ID NO: 1882658 - DNA, 15 bp, Homo sapiens
aagcagctgcatgaa

SEQ ID NO: 1882659 - DNA, 15 bp, Homo sapiens
agcagctgcatgaat

SEQ ID NO: 1882660 - DNA, 15 bp, Homo sapiens
gcagctgcatgaata

SEQ ID NO: 1882661 - DNA, 15 bp, Homo sapiens
cagctgcatgaataa

SEQ ID NO: 1882662 - DNA, 15 bp, Homo sapiens
agctgcatgaataac

SEQ ID NO: 1882663 - DNA, 15 bp, Homo sapiens
gctgcatgaataacc

SEQ ID NO: 1882664 - DNA, 15 bp, Homo sapiens
ctgcatgaataaccc

SEQ ID NO: 1882665 - DNA, 15 bp, Homo sapiens
tgcatgaataaccca

SEQ ID NO: 1882666 - DNA, 15 bp, Homo sapiens
gcatgaataacccag

SEQ ID NO: 1882667 - DNA, 15 bp, Homo sapiens
catgaataacccagt

SEQ ID NO: 1882668 - DNA, 15 bp, Homo sapiens
atgaataacccagtc

SEQ ID NO: 1882669 - DNA, 15 bp, Homo sapiens
tgaataacccagtct

SEQ ID NO: 1882670 - DNA, 15 bp, Homo sapiens
gaataacccagtctt

SEQ ID NO: 1882671 - DNA, 15 bp, Homo sapiens
aataacccagtcttt

SEQ ID NO: 1882672 - DNA, 15 bp, Homo sapiens
ataacccagtcttta

SEQ ID NO: 1882673 - DNA, 15 bp, Homo sapiens
taacccagtctttac

SEQ ID NO: 1882674 - DNA, 15 bp, Homo sapiens
aacccagtctttact

SEQ ID NO: 1882675 - DNA, 15 bp, Homo sapiens
acccagtctttactg

SEQ ID NO: 1882676 - DNA, 15 bp, Homo sapiens
cccagtctttactga

SEQ ID NO: 1882677 - DNA, 15 bp, Homo sapiens
ccagtctttactgag

SEQ ID NO: 1882678 - DNA, 15 bp, Homo sapiens
cagtctttactgagg

SEQ ID NO: 1882679 - DNA, 15 bp, Homo sapiens
agtctttactgaggt

SEQ ID NO: 1882680 - DNA, 15 bp, Homo sapiens
gtctttactgaggtc

SEQ ID NO: 1882681 - DNA, 15 bp, Homo sapiens
tctttactgaggtct

SEQ ID NO: 1882682 - DNA, 15 bp, Homo sapiens
ctttactgaggtcta

SEQ ID NO: 1882683 - DNA, 15 bp, Homo sapiens
tttactgaggtctat

SEQ ID NO: 1882684 - DNA, 15 bp, Homo sapiens
ttactgaggtctatt

SEQ ID NO: 1882685 - DNA, 15 bp, Homo sapiens
tactgaggtctatta

SEQ ID NO: 1882686 - DNA, 15 bp, Homo sapiens
actgaggtctattat

SEQ ID NO: 1882687 - DNA, 15 bp, Homo sapiens
ctgaggtctattatt

SEQ ID NO: 1882688 - DNA, 15 bp, Homo sapiens
tgaggtctattatta

SEQ ID NO: 1882689 - DNA, 15 bp, Homo sapiens
gaggtctattattac

SEQ ID NO: 1882690 - DNA, 15 bp, Homo sapiens
aggtctattattact

SEQ ID NO: 1882691 - DNA, 15 bp, Homo sapiens
ggtctattattactg

SEQ ID NO: 1882692 - DNA, 15 bp, Homo sapiens
gtctattattactgc

SEQ ID NO: 1882693 - DNA, 15 bp, Homo sapiens
tctattattactgca

SEQ ID NO: 1882694 - DNA, 15 bp, Homo sapiens
ctattattactgcat

SEQ ID NO: 1882695 - DNA, 15 bp, Homo sapiens
tattattactgcatt

SEQ ID NO: 1882696 - DNA, 15 bp, Homo sapiens
attattactgcatta

SEQ ID NO: 1882697 - DNA, 15 bp, Homo sapiens
ttattactgcattag

SEQ ID NO: 1882698 - DNA, 15 bp, Homo sapiens
tattactgcattaga

SEQ ID NO: 1882699 - DNA, 15 bp, Homo sapiens
attactgcattagaa

SEQ ID NO: 1882700 - DNA, 15 bp, Homo sapiens
ttactgcattagaaa

SEQ ID NO: 1882701 - DNA, 15 bp, Homo sapiens
tactgcattagaaat

SEQ ID NO: 1882702 - DNA, 15 bp, Homo sapiens
actgcattagaaata

SEQ ID NO: 1882703 - DNA, 15 bp, Homo sapiens
ctgcattagaaatac

SEQ ID NO: 1882704 - DNA, 15 bp, Homo sapiens
tgcattagaaatact

SEQ ID NO: 1882705 - DNA, 15 bp, Homo sapiens
gcattagaaatactg

SEQ ID NO: 1882706 - DNA, 15 bp, Homo sapiens
cattagaaatactgg

SEQ ID NO: 1882707 - DNA, 15 bp, Homo sapiens
attagaaatactggg

SEQ ID NO: 1882708 - DNA, 15 bp, Homo sapiens
ttagaaatactgggt

SEQ ID NO: 1882709 - DNA, 15 bp, Homo sapiens
tagaaatactgggta

SEQ ID NO: 1882710 - DNA, 15 bp, Homo sapiens
agaaatactgggtag

SEQ ID NO: 1882711 - DNA, 15 bp, Homo sapiens
gaaatactgggtaga

SEQ ID NO: 1882712 - DNA, 15 bp, Homo sapiens
aaatactgggtagaa

SEQ ID NO: 1882713 - DNA, 15 bp, Homo sapiens
aatactgggtagaag

SEQ ID NO: 1882714 - DNA, 15 bp, Homo sapiens
atactgggtagaagg

SEQ ID NO: 1882715 - DNA, 15 bp, Homo sapiens
tactgggtagaaggt

SEQ ID NO: 1882716 - DNA, 15 bp, Homo sapiens
actgggtagaaggtc

SEQ ID NO: 1882717 - DNA, 15 bp, Homo sapiens
ctgggtagaaggtct

SEQ ID NO: 1882718 - DNA, 15 bp, Homo sapiens
tgggtagaaggtcta

SEQ ID NO: 1882719 - DNA, 15 bp, Homo sapiens
gggtagaaggtctat

SEQ ID NO: 1882720 - DNA, 15 bp, Homo sapiens
ggtagaaggtctatc

SEQ ID NO: 1882721 - DNA, 15 bp, Homo sapiens
gtagaaggtctatca

SEQ ID NO: 1882722 - DNA, 15 bp, Homo sapiens
tagaaggtctatcac

SEQ ID NO: 1882723 - DNA, 15 bp, Homo sapiens
agaaggtctatcacc

SEQ ID NO: 1882724 - DNA, 15 bp, Homo sapiens
gaaggtctatcacct

SEQ ID NO: 1882725 - DNA, 15 bp, Homo sapiens
aaggtctatcaccta

SEQ ID NO: 1882726 - DNA, 15 bp, Homo sapiens
aggtctatcacctat

SEQ ID NO: 1882727 - DNA, 15 bp, Homo sapiens
ggtctatcacctatt

SEQ ID NO: 1882728 - DNA, 15 bp, Homo sapiens
gtctatcacctatta

SEQ ID NO: 1882729 - DNA, 15 bp, Homo sapiens
tctatcacctattac

SEQ ID NO: 1882730 - DNA, 15 bp, Homo sapiens
ctatcacctattaca

SEQ ID NO: 1882731 - DNA, 15 bp, Homo sapiens
tatcacctattacaa

SEQ ID NO: 1882732 - DNA, 15 bp, Homo sapiens
atcacctattacaaa

SEQ ID NO: 1882733 - DNA, 15 bp, Homo sapiens
tcacctattacaaag

SEQ ID NO: 1882734 - DNA, 15 bp, Homo sapiens
cacctattacaaagc

SEQ ID NO: 1882735 - DNA, 15 bp, Homo sapiens
acctattacaaagca

SEQ ID NO: 1882736 - DNA, 15 bp, Homo sapiens
cctattacaaagcaa

SEQ ID NO: 1882737 - DNA, 15 bp, Homo sapiens
ctattacaaagcaaa

SEQ ID NO: 1882738 - DNA, 15 bp, Homo sapiens
tattacaaagcaaat

SEQ ID NO: 1882739 - DNA, 15 bp, Homo sapiens
attacaaagcaaatg

SEQ ID NO: 1882740 - DNA, 15 bp, Homo sapiens
ttacaaagcaaatgt

SEQ ID NO: 1882741 - DNA, 15 bp, Homo sapiens
tacaaagcaaatgtc

SEQ ID NO: 1882742 - DNA, 15 bp, Homo sapiens
acaaagcaaatgtcc

SEQ ID NO: 1882743 - DNA, 15 bp, Homo sapiens
caaagcaaatgtcca

SEQ ID NO: 1882744 - DNA, 15 bp, Homo sapiens
aaagcaaatgtccag

SEQ ID NO: 1882745 - DNA, 15 bp, Homo sapiens
aagcaaatgtccagt

SEQ ID NO: 1882746 - DNA, 15 bp, Homo sapiens
agcaaatgtccagtt

SEQ ID NO: 1882747 - DNA, 15 bp, Homo sapiens
gcaaatgtccagtta

SEQ ID NO: 1882748 - DNA, 15 bp, Homo sapiens
caaatgtccagttaa

SEQ ID NO: 1882749 - DNA, 15 bp, Homo sapiens
aaatgtccagttaat

SEQ ID NO: 1882750 - DNA, 15 bp, Homo sapiens
aatgtccagttaata

SEQ ID NO: 1882751 - DNA, 15 bp, Homo sapiens
atgtccagttaatat

SEQ ID NO: 1882752 - DNA, 15 bp, Homo sapiens
tgtccagttaatatg

SEQ ID NO: 1882753 - DNA, 15 bp, Homo sapiens
gtccagttaatatga

SEQ ID NO: 1882754 - DNA, 15 bp, Homo sapiens
tccagttaatatgag

SEQ ID NO: 1882755 - DNA, 15 bp, Homo sapiens
ccagttaatatgagt

SEQ ID NO: 1882756 - DNA, 15 bp, Homo sapiens
cagttaatatgagtc

SEQ ID NO: 1882757 - DNA, 15 bp, Homo sapiens
agttaatatgagtca

SEQ ID NO: 1882758 - DNA, 15 bp, Homo sapiens
gttaatatgagtcat

SEQ ID NO: 1882759 - DNA, 15 bp, Homo sapiens
ttaatatgagtcatt

SEQ ID NO: 1882760 - DNA, 15 bp, Homo sapiens
taatatgagtcattt

SEQ ID NO: 1882761 - DNA, 15 bp, Homo sapiens
aatatgagtcatttt

SEQ ID NO: 1882762 - DNA, 15 bp, Homo sapiens
atatgagtcattttt

SEQ ID NO: 1882763 - DNA, 15 bp, Homo sapiens
tatgagtcatttttt

SEQ ID NO: 1882764 - DNA, 15 bp, Homo sapiens
atgagtcatttttta

SEQ ID NO: 1882765 - DNA, 15 bp, Homo sapiens
tgagtcattttttac

SEQ ID NO: 1882766 - DNA, 15 bp, Homo sapiens
gagtcattttttacc

SEQ ID NO: 1882767 - DNA, 15 bp, Homo sapiens
agtcattttttacct

SEQ ID NO: 1882768 - DNA, 15 bp, Homo sapiens
gtcattttttacctt

SEQ ID NO: 1882769 - DNA, 15 bp, Homo sapiens
tcattttttacctta

SEQ ID NO: 1882770 - DNA, 15 bp, Homo sapiens
cattttttaccttag

SEQ ID NO: 1882771 - DNA, 15 bp, Homo sapiens
attttttaccttagg

SEQ ID NO: 1882772 - DNA, 15 bp, Homo sapiens
ttttttaccttagga

SEQ ID NO: 1882773 - DNA, 15 bp, Homo sapiens
tttttaccttaggat

SEQ ID NO: 1882774 - DNA, 15 bp, Homo sapiens
ttttaccttaggatg

SEQ ID NO: 1882775 - DNA, 15 bp, Homo sapiens
tttaccttaggatga

SEQ ID NO: 1882776 - DNA, 15 bp, Homo sapiens
ttaccttaggatgaa

SEQ ID NO: 1882777 - DNA, 15 bp, Homo sapiens
taccttaggatgaat

SEQ ID NO: 1882778 - DNA, 15 bp, Homo sapiens
accttaggatgaata

SEQ ID NO: 1882779 - DNA, 15 bp, Homo sapiens
ccttaggatgaataa

SEQ ID NO: 1882780 - DNA, 15 bp, Homo sapiens
cttaggatgaataat

SEQ ID NO: 1882781 - DNA, 15 bp, Homo sapiens
ttaggatgaataatc

SEQ ID NO: 1882782 - DNA, 15 bp, Homo sapiens
taggatgaataatct

SEQ ID NO: 1882783 - DNA, 15 bp, Homo sapiens
aggatgaataatctg

SEQ ID NO: 1882784 - DNA, 15 bp, Homo sapiens
ggatgaataatctgg

SEQ ID NO: 1882785 - DNA, 15 bp, Homo sapiens
gatgaataatctggt

SEQ ID NO: 1882786 - DNA, 15 bp, Homo sapiens
atgaataatctggtc

SEQ ID NO: 1882787 - DNA, 15 bp, Homo sapiens
tgaataatctggtcc

SEQ ID NO: 1882788 - DNA, 15 bp, Homo sapiens
gaataatctggtccc

SEQ ID NO: 1882789 - DNA, 15 bp, Homo sapiens
aataatctggtccca

SEQ ID NO: 1882790 - DNA, 15 bp, Homo sapiens
ataatctggtcccat

SEQ ID NO: 1882791 - DNA, 15 bp, Homo sapiens
taatctggtcccatt

SEQ ID NO: 1882792 - DNA, 15 bp, Homo sapiens
aatctggtcccattt

SEQ ID NO: 1882793 - DNA, 15 bp, Homo sapiens
atctggtcccatttg

SEQ ID NO: 1882794 - DNA, 15 bp, Homo sapiens
tctggtcccatttga

SEQ ID NO: 1882795 - DNA, 15 bp, Homo sapiens
ctggtcccatttgat

SEQ ID NO: 1882796 - DNA, 15 bp, Homo sapiens
tggtcccatttgata

SEQ ID NO: 1882797 - DNA, 15 bp, Homo sapiens
ggtcccatttgatag

SEQ ID NO: 1882798 - DNA, 15 bp, Homo sapiens
gtcccatttgataga

SEQ ID NO: 1882799 - DNA, 15 bp, Homo sapiens
tcccatttgatagac

SEQ ID NO: 1882800 - DNA, 15 bp, Homo sapiens
cccatttgatagact

SEQ ID NO: 1882801 - DNA, 15 bp, Homo sapiens
ccatttgatagacta

SEQ ID NO: 1882802 - DNA, 15 bp, Homo sapiens
catttgatagactac

SEQ ID NO: 1882803 - DNA, 15 bp, Homo sapiens
atttgatagactact

SEQ ID NO: 1882804 - DNA, 15 bp, Homo sapiens
tttgatagactacta

SEQ ID NO: 1882805 - DNA, 15 bp, Homo sapiens
ttgatagactactac

SEQ ID NO: 1882806 - DNA, 15 bp, Homo sapiens
tgatagactactact

SEQ ID NO: 1882807 - DNA, 15 bp, Homo sapiens
gatagactactactt

SEQ ID NO: 1882808 - DNA, 15 bp, Homo sapiens
atagactactacttc

SEQ ID NO: 1882809 - DNA, 15 bp, Homo sapiens
tagactactacttct

SEQ ID NO: 1882810 - DNA, 15 bp, Homo sapiens
agactactacttctg

SEQ ID NO: 1882811 - DNA, 15 bp, Homo sapiens
gactactacttctga

SEQ ID NO: 1882812 - DNA, 15 bp, Homo sapiens
actactacttctgaa

SEQ ID NO: 1882813 - DNA, 15 bp, Homo sapiens
ctactacttctgaat

SEQ ID NO: 1882814 - DNA, 15 bp, Homo sapiens
tactacttctgaatt

SEQ ID NO: 1882815 - DNA, 15 bp, Homo sapiens
actacttctgaattg

SEQ ID NO: 1882816 - DNA, 15 bp, Homo sapiens
ctacttctgaattgg

SEQ ID NO: 1882817 - DNA, 15 bp, Homo sapiens
tacttctgaattggt

SEQ ID NO: 1882818 - DNA, 15 bp, Homo sapiens
acttctgaattggtt

SEQ ID NO: 1882819 - DNA, 15 bp, Homo sapiens
cttctgaattggttt

SEQ ID NO: 1882820 - DNA, 15 bp, Homo sapiens
ttctgaattggtttt

SEQ ID NO: 1882821 - DNA, 15 bp, Homo sapiens
tctgaattggttttt

SEQ ID NO: 1882822 - DNA, 15 bp, Homo sapiens
ctgaattggttttta

SEQ ID NO: 1882823 - DNA, 15 bp, Homo sapiens
tgaattggtttttat

SEQ ID NO: 1882824 - DNA, 15 bp, Homo sapiens
gaattggtttttata

SEQ ID NO: 1882825 - DNA, 15 bp, Homo sapiens
aattggtttttataa

SEQ ID NO: 1882826 - DNA, 15 bp, Homo sapiens
attggtttttataac

SEQ ID NO: 1882827 - DNA, 15 bp, Homo sapiens
ttggtttttataact

SEQ ID NO: 1882828 - DNA, 15 bp, Homo sapiens
tggtttttataacta

SEQ ID NO: 1882829 - DNA, 15 bp, Homo sapiens
ggtttttataactag

SEQ ID NO: 1882830 - DNA, 15 bp, Homo sapiens
gtttttataactagg

SEQ ID NO: 1882831 - DNA, 15 bp, Homo sapiens
tttttataactagga

SEQ ID NO: 1882832 - DNA, 15 bp, Homo sapiens
ttttataactaggaa

SEQ ID NO: 1882833 - DNA, 15 bp, Homo sapiens
tttataactaggaaa

SEQ ID NO: 1882834 - DNA, 15 bp, Homo sapiens
ttataactaggaaag

SEQ ID NO: 1882835 - DNA, 15 bp, Homo sapiens
tataactaggaaagc

SEQ ID NO: 1882836 - DNA, 15 bp, Homo sapiens
ataactaggaaagca

SEQ ID NO: 1882837 - DNA, 15 bp, Homo sapiens
taactaggaaagcac

SEQ ID NO: 1882838 - DNA, 15 bp, Homo sapiens
aactaggaaagcaca

SEQ ID NO: 1882839 - DNA, 15 bp, Homo sapiens
actaggaaagcacag

SEQ ID NO: 1882840 - DNA, 15 bp, Homo sapiens
ctaggaaagcacaga

SEQ ID NO: 1882841 - DNA, 15 bp, Homo sapiens
taggaaagcacagag

SEQ ID NO: 1882842 - DNA, 15 bp, Homo sapiens
aggaaagcacagagg

SEQ ID NO: 1882843 - DNA, 15 bp, Homo sapiens
ggaaagcacagaggg

SEQ ID NO: 1882844 - DNA, 15 bp, Homo sapiens
gaaagcacagaggga

SEQ ID NO: 1882845 - DNA, 15 bp, Homo sapiens
aaagcacagagggac

SEQ ID NO: 1882846 - DNA, 15 bp, Homo sapiens
aagcacagagggaca

SEQ ID NO: 1882847 - DNA, 15 bp, Homo sapiens
agcacagagggacag

SEQ ID NO: 1882848 - DNA, 15 bp, Homo sapiens
gcacagagggacagt

SEQ ID NO: 1882849 - DNA, 15 bp, Homo sapiens
cacagagggacagtg

SEQ ID NO: 1882850 - DNA, 15 bp, Homo sapiens
acagagggacagtgt

SEQ ID NO: 1882851 - DNA, 15 bp, Homo sapiens
cagagggacagtgtc

SEQ ID NO: 1882852 - DNA, 15 bp, Homo sapiens
agagggacagtgtca

SEQ ID NO: 1882853 - DNA, 15 bp, Homo sapiens
gagggacagtgtcag

SEQ ID NO: 1882854 - DNA, 15 bp, Homo sapiens
agggacagtgtcaga

SEQ ID NO: 1882855 - DNA, 15 bp, Homo sapiens
gggacagtgtcagag

SEQ ID NO: 1882856 - DNA, 15 bp, Homo sapiens
ggacagtgtcagagg

SEQ ID NO: 1882857 - DNA, 15 bp, Homo sapiens
gacagtgtcagaggg

SEQ ID NO: 1882858 - DNA, 15 bp, Homo sapiens
acagtgtcagagggc

SEQ ID NO: 1882859 - DNA, 15 bp, Homo sapiens
cagtgtcagagggca

SEQ ID NO: 1882860 - DNA, 15 bp, Homo sapiens
agtgtcagagggcac

SEQ ID NO: 1882861 - DNA, 15 bp, Homo sapiens
gtgtcagagggcact

SEQ ID NO: 1882862 - DNA, 15 bp, Homo sapiens
tgtcagagggcactt

SEQ ID NO: 1882863 - DNA, 15 bp, Homo sapiens
gtcagagggcacttg

SEQ ID NO: 1882864 - DNA, 15 bp, Homo sapiens
tcagagggcacttgg

SEQ ID NO: 1882865 - DNA, 15 bp, Homo sapiens
cagagggcacttgga

SEQ ID NO: 1882866 - DNA, 15 bp, Homo sapiens
agagggcacttggaa

SEQ ID NO: 1882867 - DNA, 15 bp, Homo sapiens
gagggcacttggaag

SEQ ID NO: 1882868 - DNA, 15 bp, Homo sapiens
agggcacttggaagt

SEQ ID NO: 1882869 - DNA, 15 bp, Homo sapiens
gggcacttggaagta

SEQ ID NO: 1882870 - DNA, 15 bp, Homo sapiens
ggcacttggaagtaa

SEQ ID NO: 1882871 - DNA, 15 bp, Homo sapiens
gcacttggaagtaaa

SEQ ID NO: 1882872 - DNA, 15 bp, Homo sapiens
cacttggaagtaaag

SEQ ID NO: 1882873 - DNA, 15 bp, Homo sapiens
acttggaagtaaaga

SEQ ID NO: 1882874 - DNA, 15 bp, Homo sapiens
cttggaagtaaagat

SEQ ID NO: 1882875 - DNA, 15 bp, Homo sapiens
ttggaagtaaagatt

SEQ ID NO: 1882876 - DNA, 15 bp, Homo sapiens
tggaagtaaagattt

SEQ ID NO: 1882877 - DNA, 15 bp, Homo sapiens
ggaagtaaagatttg

SEQ ID NO: 1882878 - DNA, 15 bp, Homo sapiens
gaagtaaagatttga

SEQ ID NO: 1882879 - DNA, 15 bp, Homo sapiens
aagtaaagatttgaa

SEQ ID NO: 1882880 - DNA, 15 bp, Homo sapiens
agtaaagatttgaaa

SEQ ID NO: 1882881 - DNA, 15 bp, Homo sapiens
gtaaagatttgaaaa

SEQ ID NO: 1882882 - DNA, 15 bp, Homo sapiens
taaagatttgaaaaa

SEQ ID NO: 1882883 - DNA, 15 bp, Homo sapiens
aaagatttgaaaaaa

SEQ ID NO: 1882884 - DNA, 15 bp, Homo sapiens
aagatttgaaaaaag

SEQ ID NO: 1882885 - DNA, 15 bp, Homo sapiens
agatttgaaaaaagg

SEQ ID NO: 1882886 - DNA, 15 bp, Homo sapiens
gatttgaaaaaagga

SEQ ID NO: 1882887 - DNA, 15 bp, Homo sapiens
atttgaaaaaaggaa

SEQ ID NO: 1882888 - DNA, 15 bp, Homo sapiens
tttgaaaaaaggaat

SEQ ID NO: 1882889 - DNA, 15 bp, Homo sapiens
ttgaaaaaaggaatg

SEQ ID NO: 1882890 - DNA, 15 bp, Homo sapiens
tgaaaaaaggaatga

SEQ ID NO: 1882891 - DNA, 15 bp, Homo sapiens
gaaaaaaggaatgat

SEQ ID NO: 1882892 - DNA, 15 bp, Homo sapiens
aaaaaaggaatgata

SEQ ID NO: 1882893 - DNA, 15 bp, Homo sapiens
aaaaaggaatgatag

SEQ ID NO: 1882894 - DNA, 15 bp, Homo sapiens
aaaaggaatgatagg

SEQ ID NO: 1882895 - DNA, 15 bp, Homo sapiens
aaaggaatgataggc

SEQ ID NO: 1882896 - DNA, 15 bp, Homo sapiens
aaggaatgataggct

SEQ ID NO: 1882897 - DNA, 15 bp, Homo sapiens
aggaatgataggcta

SEQ ID NO: 1882898 - DNA, 15 bp, Homo sapiens
ggaatgataggctac

SEQ ID NO: 1882899 - DNA, 15 bp, Homo sapiens
gaatgataggctaca

SEQ ID NO: 1882900 - DNA, 15 bp, Homo sapiens
aatgataggctacat

SEQ ID NO: 1882901 - DNA, 15 bp, Homo sapiens
atgataggctacatc

SEQ ID NO: 1882902 - DNA, 15 bp, Homo sapiens
tgataggctacatct

SEQ ID NO: 1882903 - DNA, 15 bp, Homo sapiens
gataggctacatctg

SEQ ID NO: 1882904 - DNA, 15 bp, Homo sapiens
ataggctacatctgt

SEQ ID NO: 1882905 - DNA, 15 bp, Homo sapiens
taggctacatctgtc

SEQ ID NO: 1882906 - DNA, 15 bp, Homo sapiens
aggctacatctgtct

SEQ ID NO: 1882907 - DNA, 15 bp, Homo sapiens
ggctacatctgtctg

SEQ ID NO: 1882908 - DNA, 15 bp, Homo sapiens
gctacatctgtctgt

SEQ ID NO: 1882909 - DNA, 15 bp, Homo sapiens
ctacatctgtctgtt

SEQ ID NO: 1882910 - DNA, 15 bp, Homo sapiens
tacatctgtctgttt

SEQ ID NO: 1882911 - DNA, 15 bp, Homo sapiens
acatctgtctgttta

SEQ ID NO: 1882912 - DNA, 15 bp, Homo sapiens
catctgtctgtttat

SEQ ID NO: 1882913 - DNA, 15 bp, Homo sapiens
atctgtctgtttata

SEQ ID NO: 1882914 - DNA, 15 bp, Homo sapiens
tctgtctgtttatac

SEQ ID NO: 1882915 - DNA, 15 bp, Homo sapiens
ctgtctgtttatacg

SEQ ID NO: 1882916 - DNA, 15 bp, Homo sapiens
tgtctgtttatacga

SEQ ID NO: 1882917 - DNA, 15 bp, Homo sapiens
gtctgtttatacgaa

SEQ ID NO: 1882918 - DNA, 15 bp, Homo sapiens
tctgtttatacgaag

SEQ ID NO: 1882919 - DNA, 15 bp, Homo sapiens
ctgtttatacgaagc

SEQ ID NO: 1882920 - DNA, 15 bp, Homo sapiens
tgtttatacgaagca

SEQ ID NO: 1882921 - DNA, 15 bp, Homo sapiens
gtttatacgaagcaa

SEQ ID NO: 1882922 - DNA, 15 bp, Homo sapiens
tttatacgaagcaag

SEQ ID NO: 1882923 - DNA, 15 bp, Homo sapiens
ttatacgaagcaagg

SEQ ID NO: 1882924 - DNA, 15 bp, Homo sapiens
tatacgaagcaaggg

SEQ ID NO: 1882925 - DNA, 15 bp, Homo sapiens
atacgaagcaaggga

SEQ ID NO: 1882926 - DNA, 15 bp, Homo sapiens
tacgaagcaagggag

SEQ ID NO: 1882927 - DNA, 15 bp, Homo sapiens
acgaagcaagggagc

SEQ ID NO: 1882928 - DNA, 15 bp, Homo sapiens
cgaagcaagggagct

SEQ ID NO: 1882929 - DNA, 15 bp, Homo sapiens
gaagcaagggagcta

SEQ ID NO: 1882930 - DNA, 15 bp, Homo sapiens
aagcaagggagctat

SEQ ID NO: 1882931 - DNA, 15 bp, Homo sapiens
agcaagggagctata

SEQ ID NO: 1882932 - DNA, 15 bp, Homo sapiens
gcaagggagctataa

SEQ ID NO: 1882933 - DNA, 15 bp, Homo sapiens
caagggagctataaa

SEQ ID NO: 1882934 - DNA, 15 bp, Homo sapiens
aagggagctataaag

SEQ ID NO: 1882935 - DNA, 15 bp, Homo sapiens
agggagctataaagt

SEQ ID NO: 1882936 - DNA, 15 bp, Homo sapiens
gggagctataaagtc

SEQ ID NO: 1882937 - DNA, 15 bp, Homo sapiens
ggagctataaagtct

SEQ ID NO: 1882938 - DNA, 15 bp, Homo sapiens
gagctataaagtctt

SEQ ID NO: 1882939 - DNA, 15 bp, Homo sapiens
agctataaagtcttg

SEQ ID NO: 1882940 - DNA, 15 bp, Homo sapiens
gctataaagtcttga

SEQ ID NO: 1882941 - DNA, 15 bp, Homo sapiens
ctataaagtcttgat

SEQ ID NO: 1882942 - DNA, 15 bp, Homo sapiens
tataaagtcttgata

SEQ ID NO: 1882943 - DNA, 15 bp, Homo sapiens
ataaagtcttgatag

SEQ ID NO: 1882944 - DNA, 15 bp, Homo sapiens
taaagtcttgataga

SEQ ID NO: 1882945 - DNA, 15 bp, Homo sapiens
aaagtcttgatagag

SEQ ID NO: 1882946 - DNA, 15 bp, Homo sapiens
aagtcttgatagagg

SEQ ID NO: 1882947 - DNA, 15 bp, Homo sapiens
agtcttgatagaggg

SEQ ID NO: 1882948 - DNA, 15 bp, Homo sapiens
gtcttgatagagggc

SEQ ID NO: 1882949 - DNA, 15 bp, Homo sapiens
tcttgatagagggcc

SEQ ID NO: 1882950 - DNA, 15 bp, Homo sapiens
cttgatagagggcct

SEQ ID NO: 1882951 - DNA, 15 bp, Homo sapiens
ttgatagagggcctt

SEQ ID NO: 1882952 - DNA, 15 bp, Homo sapiens
tgatagagggccttg

SEQ ID NO: 1882953 - DNA, 15 bp, Homo sapiens
gatagagggccttgg

SEQ ID NO: 1882954 - DNA, 15 bp, Homo sapiens
atagagggccttggt

SEQ ID NO: 1882955 - DNA, 15 bp, Homo sapiens
tagagggccttggta

SEQ ID NO: 1882956 - DNA, 15 bp, Homo sapiens
agagggccttggtaa

SEQ ID NO: 1882957 - DNA, 15 bp, Homo sapiens
gagggccttggtaag

SEQ ID NO: 1882958 - DNA, 15 bp, Homo sapiens
agggccttggtaaga

SEQ ID NO: 1882959 - DNA, 15 bp, Homo sapiens
gggccttggtaagat

SEQ ID NO: 1882960 - DNA, 15 bp, Homo sapiens
ggccttggtaagata

SEQ ID NO: 1882961 - DNA, 15 bp, Homo sapiens
gccttggtaagatag

SEQ ID NO: 1882962 - DNA, 15 bp, Homo sapiens
ccttggtaagatagt

SEQ ID NO: 1882963 - DNA, 15 bp, Homo sapiens
cttggtaagatagtg

SEQ ID NO: 1882964 - DNA, 15 bp, Homo sapiens
ttggtaagatagtga

SEQ ID NO: 1882965 - DNA, 15 bp, Homo sapiens
tggtaagatagtgac

SEQ ID NO: 1882966 - DNA, 15 bp, Homo sapiens
ggtaagatagtgaca

SEQ ID NO: 1882967 - DNA, 15 bp, Homo sapiens
gtaagatagtgacag

SEQ ID NO: 1882968 - DNA, 15 bp, Homo sapiens
taagatagtgacaga

SEQ ID NO: 1882969 - DNA, 15 bp, Homo sapiens
aagatagtgacagag

SEQ ID NO: 1882970 - DNA, 15 bp, Homo sapiens
agatagtgacagaga

SEQ ID NO: 1882971 - DNA, 15 bp, Homo sapiens
gatagtgacagagag

SEQ ID NO: 1882972 - DNA, 15 bp, Homo sapiens
atagtgacagagagt

SEQ ID NO: 1882973 - DNA, 15 bp, Homo sapiens
tagtgacagagagta

SEQ ID NO: 1882974 - DNA, 15 bp, Homo sapiens
agtgacagagagtag

SEQ ID NO: 1882975 - DNA, 15 bp, Homo sapiens
gtgacagagagtagg

SEQ ID NO: 1882976 - DNA, 15 bp, Homo sapiens
tgacagagagtaggg

SEQ ID NO: 1882977 - DNA, 15 bp, Homo sapiens
gacagagagtagggg

SEQ ID NO: 1882978 - DNA, 15 bp, Homo sapiens
acagagagtaggggc

SEQ ID NO: 1882979 - DNA, 15 bp, Homo sapiens
cagagagtaggggct

SEQ ID NO: 1882980 - DNA, 15 bp, Homo sapiens
agagagtaggggctt

SEQ ID NO: 1882981 - DNA, 15 bp, Homo sapiens
gagagtaggggcttt

SEQ ID NO: 1882982 - DNA, 15 bp, Homo sapiens
agagtaggggcttta

SEQ ID NO: 1882983 - DNA, 15 bp, Homo sapiens
gagtaggggctttag

SEQ ID NO: 1882984 - DNA, 15 bp, Homo sapiens
agtaggggctttagg

SEQ ID NO: 1882985 - DNA, 15 bp, Homo sapiens
gtaggggctttaggc

SEQ ID NO: 1882986 - DNA, 15 bp, Homo sapiens
taggggctttaggct

SEQ ID NO: 1882987 - DNA, 15 bp, Homo sapiens
aggggctttaggcta

SEQ ID NO: 1882988 - DNA, 15 bp, Homo sapiens
ggggctttaggctaa

SEQ ID NO: 1882989 - DNA, 15 bp, Homo sapiens
gggctttaggctaag

SEQ ID NO: 1882990 - DNA, 15 bp, Homo sapiens
ggctttaggctaagt

SEQ ID NO: 1882991 - DNA, 15 bp, Homo sapiens
gctttaggctaagtg

SEQ ID NO: 1882992 - DNA, 15 bp, Homo sapiens
ctttaggctaagtga

SEQ ID NO: 1882993 - DNA, 15 bp, Homo sapiens
tttaggctaagtgac

SEQ ID NO: 1882994 - DNA, 15 bp, Homo sapiens
ttaggctaagtgact

SEQ ID NO: 1882995 - DNA, 15 bp, Homo sapiens
taggctaagtgacta

SEQ ID NO: 1882996 - DNA, 15 bp, Homo sapiens
aggctaagtgactat

SEQ ID NO: 1882997 - DNA, 15 bp, Homo sapiens
ggctaagtgactatt

SEQ ID NO: 1882998 - DNA, 15 bp, Homo sapiens
gctaagtgactattt

SEQ ID NO: 1882999 - DNA, 15 bp, Homo sapiens
ctaagtgactattta

SEQ ID NO: 1883000 - DNA, 15 bp, Homo sapiens
taagtgactatttaa

SEQ ID NO: 1883001 - DNA, 15 bp, Homo sapiens
aagtgactatttaat

SEQ ID NO: 1883002 - DNA, 15 bp, Homo sapiens
agtgactatttaatt

SEQ ID NO: 1883003 - DNA, 15 bp, Homo sapiens
gtgactatttaatta

SEQ ID NO: 1883004 - DNA, 15 bp, Homo sapiens
tgactatttaattag

SEQ ID NO: 1883005 - DNA, 15 bp, Homo sapiens
gactatttaattagc

SEQ ID NO: 1883006 - DNA, 15 bp, Homo sapiens
actatttaattagct

SEQ ID NO: 1883007 - DNA, 15 bp, Homo sapiens
ctatttaattagctc

SEQ ID NO: 1883008 - DNA, 15 bp, Homo sapiens
tatttaattagctct

SEQ ID NO: 1883009 - DNA, 15 bp, Homo sapiens
atttaattagctctg

SEQ ID NO: 1883010 - DNA, 15 bp, Homo sapiens
tttaattagctctgt

SEQ ID NO: 1883011 - DNA, 15 bp, Homo sapiens
ttaattagctctgtg

SEQ ID NO: 1883012 - DNA, 15 bp, Homo sapiens
taattagctctgtga

SEQ ID NO: 1883013 - DNA, 15 bp, Homo sapiens
attagctctgtgact

SEQ ID NO: 1883014 - DNA, 15 bp, Homo sapiens
ttagctctgtgactt

SEQ ID NO: 1883015 - DNA, 15 bp, Homo sapiens
tagctctgtgacttt

SEQ ID NO: 1883016 - DNA, 15 bp, Homo sapiens
agctctgtgactttg

SEQ ID NO: 1883017 - DNA, 15 bp, Homo sapiens
gctctgtgactttgg

SEQ ID NO: 1883018 - DNA, 15 bp, Homo sapiens
ctctgtgactttggt

SEQ ID NO: 1883019 - DNA, 15 bp, Homo sapiens
tctgtgactttggtc

SEQ ID NO: 1883020 - DNA, 15 bp, Homo sapiens
ctgtgactttggtca

SEQ ID NO: 1883021 - DNA, 15 bp, Homo sapiens
tgtgactttggtcag

SEQ ID NO: 1883022 - DNA, 15 bp, Homo sapiens
gtgactttggtcagg

SEQ ID NO: 1883023 - DNA, 15 bp, Homo sapiens
tgactttggtcaggt

SEQ ID NO: 1883024 - DNA, 15 bp, Homo sapiens
gactttggtcaggtc

SEQ ID NO: 1883025 - DNA, 15 bp, Homo sapiens
actttggtcaggtca

SEQ ID NO: 1883026 - DNA, 15 bp, Homo sapiens
ctttggtcaggtcat

SEQ ID NO: 1883027 - DNA, 15 bp, Homo sapiens
tttggtcaggtcatt

SEQ ID NO: 1883028 - DNA, 15 bp, Homo sapiens
ttggtcaggtcattg

SEQ ID NO: 1883029 - DNA, 15 bp, Homo sapiens
tggtcaggtcattgt

SEQ ID NO: 1883030 - DNA, 15 bp, Homo sapiens
ggtcaggtcattgta

SEQ ID NO: 1883031 - DNA, 15 bp, Homo sapiens
gtcaggtcattgtaa

SEQ ID NO: 1883032 - DNA, 15 bp, Homo sapiens
tcaggtcattgtaac

SEQ ID NO: 1883033 - DNA, 15 bp, Homo sapiens
caggtcattgtaact

SEQ ID NO: 1883034 - DNA, 15 bp, Homo sapiens
aggtcattgtaactt

SEQ ID NO: 1883035 - DNA, 15 bp, Homo sapiens
ggtcattgtaacttg

SEQ ID NO: 1883036 - DNA, 15 bp, Homo sapiens
gtcattgtaacttga

SEQ ID NO: 1883037 - DNA, 15 bp, Homo sapiens
tcattgtaacttgat

SEQ ID NO: 1883038 - DNA, 15 bp, Homo sapiens
cattgtaacttgatg

SEQ ID NO: 1883039 - DNA, 15 bp, Homo sapiens
attgtaacttgatgg

SEQ ID NO: 1883040 - DNA, 15 bp, Homo sapiens
ttgtaacttgatggg

SEQ ID NO: 1883041 - DNA, 15 bp, Homo sapiens
tgtaacttgatgggt

SEQ ID NO: 1883042 - DNA, 15 bp, Homo sapiens
gtaacttgatgggta

SEQ ID NO: 1883043 - DNA, 15 bp, Homo sapiens
taacttgatgggtag

SEQ ID NO: 1883044 - DNA, 15 bp, Homo sapiens
aacttgatgggtagt

SEQ ID NO: 1883045 - DNA, 15 bp, Homo sapiens
acttgatgggtagtt

SEQ ID NO: 1883046 - DNA, 15 bp, Homo sapiens
cttgatgggtagttc

SEQ ID NO: 1883047 - DNA, 15 bp, Homo sapiens
ttgatgggtagttct

SEQ ID NO: 1883048 - DNA, 15 bp, Homo sapiens
tgatgggtagttctc

SEQ ID NO: 1883049 - DNA, 15 bp, Homo sapiens
gatgggtagttctca

SEQ ID NO: 1883050 - DNA, 15 bp, Homo sapiens
atgggtagttctcat

SEQ ID NO: 1883051 - DNA, 15 bp, Homo sapiens
tgggtagttctcatt

SEQ ID NO: 1883052 - DNA, 15 bp, Homo sapiens
gggtagttctcattc

SEQ ID NO: 1883053 - DNA, 15 bp, Homo sapiens
ggtagttctcattct

SEQ ID NO: 1883054 - DNA, 15 bp, Homo sapiens
gtagttctcattctg

SEQ ID NO: 1883055 - DNA, 15 bp, Homo sapiens
tagttctcattctgc

SEQ ID NO: 1883056 - DNA, 15 bp, Homo sapiens
agttctcattctgca

SEQ ID NO: 1883057 - DNA, 15 bp, Homo sapiens
gttctcattctgcat

SEQ ID NO: 1883058 - DNA, 15 bp, Homo sapiens
ttctcattctgcatc

SEQ ID NO: 1883059 - DNA, 15 bp, Homo sapiens
tctcattctgcatct

SEQ ID NO: 1883060 - DNA, 15 bp, Homo sapiens
ctcattctgcatctg

SEQ ID NO: 1883061 - DNA, 15 bp, Homo sapiens
tcattctgcatctgt

SEQ ID NO: 1883062 - DNA, 15 bp, Homo sapiens
cattctgcatctgta

SEQ ID NO: 1883063 - DNA, 15 bp, Homo sapiens
attctgcatctgtaa

SEQ ID NO: 1883064 - DNA, 15 bp, Homo sapiens
ttctgcatctgtaag

SEQ ID NO: 1883065 - DNA, 15 bp, Homo sapiens
tctgcatctgtaagt

SEQ ID NO: 1883066 - DNA, 15 bp, Homo sapiens
ctgcatctgtaagtg

SEQ ID NO: 1883067 - DNA, 15 bp, Homo sapiens
tgcatctgtaagtgg

SEQ ID NO: 1883068 - DNA, 15 bp, Homo sapiens
gcatctgtaagtgga

SEQ ID NO: 1883069 - DNA, 15 bp, Homo sapiens
catctgtaagtggac

SEQ ID NO: 1883070 - DNA, 15 bp, Homo sapiens
atctgtaagtggact

SEQ ID NO: 1883071 - DNA, 15 bp, Homo sapiens
tctgtaagtggactc

SEQ ID NO: 1883072 - DNA, 15 bp, Homo sapiens
ctgtaagtggactct

SEQ ID NO: 1883073 - DNA, 15 bp, Homo sapiens
tgtaagtggactcta

SEQ ID NO: 1883074 - DNA, 15 bp, Homo sapiens
gtaagtggactctac

SEQ ID NO: 1883075 - DNA, 15 bp, Homo sapiens
taagtggactctaca

SEQ ID NO: 1883076 - DNA, 15 bp, Homo sapiens
aagtggactctacat

SEQ ID NO: 1883077 - DNA, 15 bp, Homo sapiens
agtggactctacata

SEQ ID NO: 1883078 - DNA, 15 bp, Homo sapiens
gtggactctacatag

SEQ ID NO: 1883079 - DNA, 15 bp, Homo sapiens
tggactctacatagt

SEQ ID NO: 1883080 - DNA, 15 bp, Homo sapiens
ggactctacatagtc

SEQ ID NO: 1883081 - DNA, 15 bp, Homo sapiens
gactctacatagtcc

SEQ ID NO: 1883082 - DNA, 15 bp, Homo sapiens
actctacatagtcct

SEQ ID NO: 1883083 - DNA, 15 bp, Homo sapiens
ctctacatagtcctt

SEQ ID NO: 1883084 - DNA, 15 bp, Homo sapiens
tctacatagtccttt

SEQ ID NO: 1883085 - DNA, 15 bp, Homo sapiens
ctacatagtccttta

SEQ ID NO: 1883086 - DNA, 15 bp, Homo sapiens
tacatagtcctttaa

SEQ ID NO: 1883087 - DNA, 15 bp, Homo sapiens
acatagtcctttaag

SEQ ID NO: 1883088 - DNA, 15 bp, Homo sapiens
catagtcctttaagg

SEQ ID NO: 1883089 - DNA, 15 bp, Homo sapiens
atagtcctttaaggt

SEQ ID NO: 1883090 - DNA, 15 bp, Homo sapiens
tagtcctttaaggtc

SEQ ID NO: 1883091 - DNA, 15 bp, Homo sapiens
agtcctttaaggtcc

SEQ ID NO: 1883092 - DNA, 15 bp, Homo sapiens
gtcctttaaggtcct

SEQ ID NO: 1883093 - DNA, 15 bp, Homo sapiens
tcctttaaggtcctt

SEQ ID NO: 1883094 - DNA, 15 bp, Homo sapiens
cctttaaggtccttt

SEQ ID NO: 1883095 - DNA, 15 bp, Homo sapiens
ctttaaggtcctttt

SEQ ID NO: 1883096 - DNA, 15 bp, Homo sapiens
tttaaggtccttttt

SEQ ID NO: 1883097 - DNA, 15 bp, Homo sapiens
ttaaggtccttttta

SEQ ID NO: 1883098 - DNA, 15 bp, Homo sapiens
taaggtcctttttag

SEQ ID NO: 1883099 - DNA, 15 bp, Homo sapiens
aaggtcctttttagc

SEQ ID NO: 1883100 - DNA, 15 bp, Homo sapiens
aggtcctttttagcg

SEQ ID NO: 1883101 - DNA, 15 bp, Homo sapiens
ggtcctttttagcgc

SEQ ID NO: 1883102 - DNA, 15 bp, Homo sapiens
gtcctttttagcgct

SEQ ID NO: 1883103 - DNA, 15 bp, Homo sapiens
tcctttttagcgctg

SEQ ID NO: 1883104 - DNA, 15 bp, Homo sapiens
cctttttagcgctga

SEQ ID NO: 1883105 - DNA, 15 bp, Homo sapiens
ctttttagcgctgac

SEQ ID NO: 1883106 - DNA, 15 bp, Homo sapiens
tttttagcgctgaca

SEQ ID NO: 1883107 - DNA, 15 bp, Homo sapiens
ttttagcgctgacac

SEQ ID NO: 1883108 - DNA, 15 bp, Homo sapiens
tttagcgctgacact

SEQ ID NO: 1883109 - DNA, 15 bp, Homo sapiens
ttagcgctgacactt

SEQ ID NO: 1883110 - DNA, 15 bp, Homo sapiens
tagcgctgacacttt

SEQ ID NO: 1883111 - DNA, 15 bp, Homo sapiens
agcgctgacacttta

SEQ ID NO: 1883112 - DNA, 15 bp, Homo sapiens
gcgctgacactttat

SEQ ID NO: 1883113 - DNA, 15 bp, Homo sapiens
cgctgacactttatg

SEQ ID NO: 1883114 - DNA, 15 bp, Homo sapiens
gctgacactttatga

SEQ ID NO: 1883115 - DNA, 15 bp, Homo sapiens
ctgacactttatgat

SEQ ID NO: 1883116 - DNA, 15 bp, Homo sapiens
tgacactttatgatt

SEQ ID NO: 1883117 - DNA, 15 bp, Homo sapiens
gacactttatgattc

SEQ ID NO: 1883118 - DNA, 15 bp, Homo sapiens
acactttatgattct

SEQ ID NO: 1883119 - DNA, 15 bp, Homo sapiens
cactttatgattctg

SEQ ID NO: 1883120 - DNA, 15 bp, Homo sapiens
actttatgattctgc

SEQ ID NO: 1883121 - DNA, 15 bp, Homo sapiens
ctttatgattctgct

SEQ ID NO: 1883122 - DNA, 15 bp, Homo sapiens
tttatgattctgctg

SEQ ID NO: 1883123 - DNA, 15 bp, Homo sapiens
ttatgattctgctgg

SEQ ID NO: 1883124 - DNA, 15 bp, Homo sapiens
tatgattctgctgga

SEQ ID NO: 1883125 - DNA, 15 bp, Homo sapiens
atgattctgctggaa

SEQ ID NO: 1883126 - DNA, 15 bp, Homo sapiens
tgattctgctggaag

SEQ ID NO: 1883127 - DNA, 15 bp, Homo sapiens
gattctgctggaaga

SEQ ID NO: 1883128 - DNA, 15 bp, Homo sapiens
attctgctggaagaa

SEQ ID NO: 1883129 - DNA, 15 bp, Homo sapiens
ttctgctggaagaac

SEQ ID NO: 1883130 - DNA, 15 bp, Homo sapiens
tctgctggaagaact

SEQ ID NO: 1883131 - DNA, 15 bp, Homo sapiens
ctgctggaagaactg

SEQ ID NO: 1883132 - DNA, 15 bp, Homo sapiens
tgctggaagaactga

SEQ ID NO: 1883133 - DNA, 15 bp, Homo sapiens
gctggaagaactgag

SEQ ID NO: 1883134 - DNA, 15 bp, Homo sapiens
ctggaagaactgaga

SEQ ID NO: 1883135 - DNA, 15 bp, Homo sapiens
tggaagaactgagaa

SEQ ID NO: 1883136 - DNA, 15 bp, Homo sapiens
ggaagaactgagaaa

SEQ ID NO: 1883137 - DNA, 15 bp, Homo sapiens
gaagaactgagaaat

SEQ ID NO: 1883138 - DNA, 15 bp, Homo sapiens
aagaactgagaaatc

SEQ ID NO: 1883139 - DNA, 15 bp, Homo sapiens
agaactgagaaatct

SEQ ID NO: 1883140 - DNA, 15 bp, Homo sapiens
gaactgagaaatctg

SEQ ID NO: 1883141 - DNA, 15 bp, Homo sapiens
aactgagaaatctga

SEQ ID NO: 1883142 - DNA, 15 bp, Homo sapiens
actgagaaatctgaa

SEQ ID NO: 1883143 - DNA, 15 bp, Homo sapiens
ctgagaaatctgaag

SEQ ID NO: 1883144 - DNA, 15 bp, Homo sapiens
tgagaaatctgaaga

SEQ ID NO: 1883145 - DNA, 15 bp, Homo sapiens
gagaaatctgaagaa

SEQ ID NO: 1883146 - DNA, 15 bp, Homo sapiens
agaaatctgaagaaa

SEQ ID NO: 1883147 - DNA, 15 bp, Homo sapiens
gaaatctgaagaaac

SEQ ID NO: 1883148 - DNA, 15 bp, Homo sapiens
aaatctgaagaaacc

SEQ ID NO: 1883149 - DNA, 15 bp, Homo sapiens
aatctgaagaaaccc

SEQ ID NO: 1883150 - DNA, 15 bp, Homo sapiens
atctgaagaaaccca

SEQ ID NO: 1883151 - DNA, 15 bp, Homo sapiens
tctgaagaaacccag

SEQ ID NO: 1883152 - DNA, 15 bp, Homo sapiens
ctgaagaaacccagg

SEQ ID NO: 1883153 - DNA, 15 bp, Homo sapiens
tgaagaaacccaggg

SEQ ID NO: 1883154 - DNA, 15 bp, Homo sapiens
gaagaaacccagggt

SEQ ID NO: 1883155 - DNA, 15 bp, Homo sapiens
aagaaacccagggtt

SEQ ID NO: 1883156 - DNA, 15 bp, Homo sapiens
agaaacccagggttt

SEQ ID NO: 1883157 - DNA, 15 bp, Homo sapiens
gaaacccagggtttg

SEQ ID NO: 1883158 - DNA, 15 bp, Homo sapiens
aaacccagggtttgt

SEQ ID NO: 1883159 - DNA, 15 bp, Homo sapiens
aacccagggtttgtg

SEQ ID NO: 1883160 - DNA, 15 bp, Homo sapiens
acccagggtttgtgt

SEQ ID NO: 1883161 - DNA, 15 bp, Homo sapiens
cccagggtttgtgtg

SEQ ID NO: 1883162 - DNA, 15 bp, Homo sapiens
ccagggtttgtgtgt

SEQ ID NO: 1883163 - DNA, 15 bp, Homo sapiens
cagggtttgtgtgtg

SEQ ID NO: 1883164 - DNA, 15 bp, Homo sapiens
agggtttgtgtgtgt

SEQ ID NO: 1883165 - DNA, 15 bp, Homo sapiens
gggtttgtgtgtgtg

SEQ ID NO: 1883166 - DNA, 15 bp, Homo sapiens
ggtttgtgtgtgtgt

SEQ ID NO: 1883167 - DNA, 15 bp, Homo sapiens
gtttgtgtgtgtgtg

SEQ ID NO: 1883168 - DNA, 15 bp, Homo sapiens
tttgtgtgtgtgtga

SEQ ID NO: 1883169 - DNA, 15 bp, Homo sapiens
ttgtgtgtgtgtgat

SEQ ID NO: 1883170 - DNA, 15 bp, Homo sapiens
tgtgtgtgtgtgatg

SEQ ID NO: 1883171 - DNA, 15 bp, Homo sapiens
gtgtgtgtgtgatgg

SEQ ID NO: 1883172 - DNA, 15 bp, Homo sapiens
tgtgtgtgtgatggg

SEQ ID NO: 1883173 - DNA, 15 bp, Homo sapiens
gtgtgtgtgatgggt

SEQ ID NO: 1883174 - DNA, 15 bp, Homo sapiens
tgtgtgtgatgggta

SEQ ID NO: 1883175 - DNA, 15 bp, Homo sapiens
gtgtgtgatgggtac

SEQ ID NO: 1883176 - DNA, 15 bp, Homo sapiens
tgtgtgatgggtaca

SEQ ID NO: 1883177 - DNA, 15 bp, Homo sapiens
gtgtgatgggtacag

SEQ ID NO: 1883178 - DNA, 15 bp, Homo sapiens
tgtgatgggtacagg

SEQ ID NO: 1883179 - DNA, 15 bp, Homo sapiens
gtgatgggtacaggc

SEQ ID NO: 1883180 - DNA, 15 bp, Homo sapiens
tgatgggtacaggca

SEQ ID NO: 1883181 - DNA, 15 bp, Homo sapiens
gatgggtacaggcat

SEQ ID NO: 1883182 - DNA, 15 bp, Homo sapiens
atgggtacaggcatg

SEQ ID NO: 1883183 - DNA, 15 bp, Homo sapiens
tgggtacaggcatgc

SEQ ID NO: 1883184 - DNA, 15 bp, Homo sapiens
gggtacaggcatgcc

SEQ ID NO: 1883185 - DNA, 15 bp, Homo sapiens
ggtacaggcatgcca

SEQ ID NO: 1883186 - DNA, 15 bp, Homo sapiens
gtacaggcatgccag

SEQ ID NO: 1883187 - DNA, 15 bp, Homo sapiens
tacaggcatgccagg

SEQ ID NO: 1883188 - DNA, 15 bp, Homo sapiens
acaggcatgccagga

SEQ ID NO: 1883189 - DNA, 15 bp, Homo sapiens
caggcatgccaggag

SEQ ID NO: 1883190 - DNA, 15 bp, Homo sapiens
aggcatgccaggagc

SEQ ID NO: 1883191 - DNA, 15 bp, Homo sapiens
ggcatgccaggagcc

SEQ ID NO: 1883192 - DNA, 15 bp, Homo sapiens
gcatgccaggagcct

SEQ ID NO: 1883193 - DNA, 15 bp, Homo sapiens
catgccaggagcctg

SEQ ID NO: 1883194 - DNA, 15 bp, Homo sapiens
atgccaggagcctgt

SEQ ID NO: 1883195 - DNA, 15 bp, Homo sapiens
tgccaggagcctgtg

SEQ ID NO: 1883196 - DNA, 15 bp, Homo sapiens
gccaggagcctgtga

SEQ ID NO: 1883197 - DNA, 15 bp, Homo sapiens
caggagcctgtgaga

SEQ ID NO: 1883198 - DNA, 15 bp, Homo sapiens
aggagcctgtgagag

SEQ ID NO: 1883199 - DNA, 15 bp, Homo sapiens
ggagcctgtgagagg

SEQ ID NO: 1883200 - DNA, 15 bp, Homo sapiens
gagcctgtgagaggt

SEQ ID NO: 1883201 - DNA, 15 bp, Homo sapiens
agcctgtgagaggta

SEQ ID NO: 1883202 - DNA, 15 bp, Homo sapiens
gcctgtgagaggtat

SEQ ID NO: 1883203 - DNA, 15 bp, Homo sapiens
cctgtgagaggtatt

SEQ ID NO: 1883204 - DNA, 15 bp, Homo sapiens
ctgtgagaggtatta

SEQ ID NO: 1883205 - DNA, 15 bp, Homo sapiens
tgtgagaggtattat

SEQ ID NO: 1883206 - DNA, 15 bp, Homo sapiens
gtgagaggtattatg

SEQ ID NO: 1883207 - DNA, 15 bp, Homo sapiens
tgagaggtattatgg

SEQ ID NO: 1883208 - DNA, 15 bp, Homo sapiens
gagaggtattatgga

SEQ ID NO: 1883209 - DNA, 15 bp, Homo sapiens
agaggtattatggat

SEQ ID NO: 1883210 - DNA, 15 bp, Homo sapiens
gaggtattatggatc

SEQ ID NO: 1883211 - DNA, 15 bp, Homo sapiens
aggtattatggatct

SEQ ID NO: 1883212 - DNA, 15 bp, Homo sapiens
ggtattatggatctg

SEQ ID NO: 1883213 - DNA, 15 bp, Homo sapiens
gtattatggatctgt

SEQ ID NO: 1883214 - DNA, 15 bp, Homo sapiens
tattatggatctgtg

SEQ ID NO: 1883215 - DNA, 15 bp, Homo sapiens
attatggatctgtga

SEQ ID NO: 1883216 - DNA, 15 bp, Homo sapiens
ttatggatctgtgac

SEQ ID NO: 1883217 - DNA, 15 bp, Homo sapiens
tatggatctgtgaca

SEQ ID NO: 1883218 - DNA, 15 bp, Homo sapiens
atggatctgtgacat

SEQ ID NO: 1883219 - DNA, 15 bp, Homo sapiens
tggatctgtgacata

SEQ ID NO: 1883220 - DNA, 15 bp, Homo sapiens
ggatctgtgacatag

SEQ ID NO: 1883221 - DNA, 15 bp, Homo sapiens
gatctgtgacataga

SEQ ID NO: 1883222 - DNA, 15 bp, Homo sapiens
atctgtgacatagac

SEQ ID NO: 1883223 - DNA, 15 bp, Homo sapiens
tctgtgacatagact

SEQ ID NO: 1883224 - DNA, 15 bp, Homo sapiens
ctgtgacatagactt

SEQ ID NO: 1883225 - DNA, 15 bp, Homo sapiens
tgtgacatagacttg

SEQ ID NO: 1883226 - DNA, 15 bp, Homo sapiens
gtgacatagacttgt

SEQ ID NO: 1883227 - DNA, 15 bp, Homo sapiens
tgacatagacttgta

SEQ ID NO: 1883228 - DNA, 15 bp, Homo sapiens
gacatagacttgtag

SEQ ID NO: 1883229 - DNA, 15 bp, Homo sapiens
acatagacttgtagt

SEQ ID NO: 1883230 - DNA, 15 bp, Homo sapiens
catagacttgtagtg

SEQ ID NO: 1883231 - DNA, 15 bp, Homo sapiens
atagacttgtagtgg

SEQ ID NO: 1883232 - DNA, 15 bp, Homo sapiens
tagacttgtagtggc

SEQ ID NO: 1883233 - DNA, 15 bp, Homo sapiens
agacttgtagtggca

SEQ ID NO: 1883234 - DNA, 15 bp, Homo sapiens
gacttgtagtggcag

SEQ ID NO: 1883235 - DNA, 15 bp, Homo sapiens
acttgtagtggcagg

SEQ ID NO: 1883236 - DNA, 15 bp, Homo sapiens
cttgtagtggcaggg

SEQ ID NO: 1883237 - DNA, 15 bp, Homo sapiens
ttgtagtggcagggg

SEQ ID NO: 1883238 - DNA, 15 bp, Homo sapiens
tgtagtggcaggggc

SEQ ID NO: 1883239 - DNA, 15 bp, Homo sapiens
gtagtggcaggggct

SEQ ID NO: 1883240 - DNA, 15 bp, Homo sapiens
tagtggcaggggcta

SEQ ID NO: 1883241 - DNA, 15 bp, Homo sapiens
agtggcaggggctaa

SEQ ID NO: 1883242 - DNA, 15 bp, Homo sapiens
gtggcaggggctaag

SEQ ID NO: 1883243 - DNA, 15 bp, Homo sapiens
tggcaggggctaagt

SEQ ID NO: 1883244 - DNA, 15 bp, Homo sapiens
ggcaggggctaagtc

SEQ ID NO: 1883245 - DNA, 15 bp, Homo sapiens
gcaggggctaagtct

SEQ ID NO: 1883246 - DNA, 15 bp, Homo sapiens
caggggctaagtctg

SEQ ID NO: 1883247 - DNA, 15 bp, Homo sapiens
aggggctaagtctgt

SEQ ID NO: 1883248 - DNA, 15 bp, Homo sapiens
ggggctaagtctgta

SEQ ID NO: 1883249 - DNA, 15 bp, Homo sapiens
gggctaagtctgtaa

SEQ ID NO: 1883250 - DNA, 15 bp, Homo sapiens
ggctaagtctgtaat

SEQ ID NO: 1883251 - DNA, 15 bp, Homo sapiens
gctaagtctgtaatc

SEQ ID NO: 1883252 - DNA, 15 bp, Homo sapiens
ctaagtctgtaatcc

SEQ ID NO: 1883253 - DNA, 15 bp, Homo sapiens
taagtctgtaatcct

SEQ ID NO: 1883254 - DNA, 15 bp, Homo sapiens
aagtctgtaatcctg

SEQ ID NO: 1883255 - DNA, 15 bp, Homo sapiens
agtctgtaatcctgg

SEQ ID NO: 1883256 - DNA, 15 bp, Homo sapiens
gtctgtaatcctgga

SEQ ID NO: 1883257 - DNA, 15 bp, Homo sapiens
tctgtaatcctggag

SEQ ID NO: 1883258 - DNA, 15 bp, Homo sapiens
ctgtaatcctggagc

SEQ ID NO: 1883259 - DNA, 15 bp, Homo sapiens
tgtaatcctggagca

SEQ ID NO: 1883260 - DNA, 15 bp, Homo sapiens
gtaatcctggagcac

SEQ ID NO: 1883261 - DNA, 15 bp, Homo sapiens
taatcctggagcacc

SEQ ID NO: 1883262 - DNA, 15 bp, Homo sapiens
aatcctggagcaccg

SEQ ID NO: 1883263 - DNA, 15 bp, Homo sapiens
atcctggagcaccgc

SEQ ID NO: 1883264 - DNA, 15 bp, Homo sapiens
tcctggagcaccgct

SEQ ID NO: 1883265 - DNA, 15 bp, Homo sapiens
cctggagcaccgctt

SEQ ID NO: 1883266 - DNA, 15 bp, Homo sapiens
ctggagcaccgcttg

SEQ ID NO: 1883267 - DNA, 15 bp, Homo sapiens
tggagcaccgcttgt

SEQ ID NO: 1883268 - DNA, 15 bp, Homo sapiens
ggagcaccgcttgtg

SEQ ID NO: 1883269 - DNA, 15 bp, Homo sapiens
gagcaccgcttgtga

SEQ ID NO: 1883270 - DNA, 15 bp, Homo sapiens
agcaccgcttgtgat

SEQ ID NO: 1883271 - DNA, 15 bp, Homo sapiens
gcaccgcttgtgatt

SEQ ID NO: 1883272 - DNA, 15 bp, Homo sapiens
caccgcttgtgattg

SEQ ID NO: 1883273 - DNA, 15 bp, Homo sapiens
accgcttgtgattgg

SEQ ID NO: 1883274 - DNA, 15 bp, Homo sapiens
ccgcttgtgattggt

SEQ ID NO: 1883275 - DNA, 15 bp, Homo sapiens
cgcttgtgattggtg

SEQ ID NO: 1883276 - DNA, 15 bp, Homo sapiens
gcttgtgattggtgt

SEQ ID NO: 1883277 - DNA, 15 bp, Homo sapiens
cttgtgattggtgtg

SEQ ID NO: 1883278 - DNA, 15 bp, Homo sapiens
ttgtgattggtgtgg

SEQ ID NO: 1883279 - DNA, 15 bp, Homo sapiens
tgtgattggtgtgga

SEQ ID NO: 1883280 - DNA, 15 bp, Homo sapiens
gtgattggtgtggaa

SEQ ID NO: 1883281 - DNA, 15 bp, Homo sapiens
tgattggtgtggaac

SEQ ID NO: 1883282 - DNA, 15 bp, Homo sapiens
gattggtgtggaaca

SEQ ID NO: 1883283 - DNA, 15 bp, Homo sapiens
attggtgtggaacat

SEQ ID NO: 1883284 - DNA, 15 bp, Homo sapiens
ttggtgtggaacatg

SEQ ID NO: 1883285 - DNA, 15 bp, Homo sapiens
tggtgtggaacatgt

SEQ ID NO: 1883286 - DNA, 15 bp, Homo sapiens
ggtgtggaacatgta

SEQ ID NO: 1883287 - DNA, 15 bp, Homo sapiens
gtgtggaacatgtag

SEQ ID NO: 1883288 - DNA, 15 bp, Homo sapiens
tgtggaacatgtagt

SEQ ID NO: 1883289 - DNA, 15 bp, Homo sapiens
gtggaacatgtagtg

SEQ ID NO: 1883290 - DNA, 15 bp, Homo sapiens
tggaacatgtagtgc

SEQ ID NO: 1883291 - DNA, 15 bp, Homo sapiens
ggaacatgtagtgct

SEQ ID NO: 1883292 - DNA, 15 bp, Homo sapiens
gaacatgtagtgctg

SEQ ID NO: 1883293 - DNA, 15 bp, Homo sapiens
aacatgtagtgctgt

SEQ ID NO: 1883294 - DNA, 15 bp, Homo sapiens
acatgtagtgctgtg

SEQ ID NO: 1883295 - DNA, 15 bp, Homo sapiens
catgtagtgctgtgt

SEQ ID NO: 1883296 - DNA, 15 bp, Homo sapiens
atgtagtgctgtgtg

SEQ ID NO: 1883297 - DNA, 15 bp, Homo sapiens
tgtagtgctgtgtga

SEQ ID NO: 1883298 - DNA, 15 bp, Homo sapiens
gtagtgctgtgtgat

SEQ ID NO: 1883299 - DNA, 15 bp, Homo sapiens
tagtgctgtgtgatg

SEQ ID NO: 1883300 - DNA, 15 bp, Homo sapiens
agtgctgtgtgatgg

SEQ ID NO: 1883301 - DNA, 15 bp, Homo sapiens
gtgctgtgtgatgga

SEQ ID NO: 1883302 - DNA, 15 bp, Homo sapiens
tgctgtgtgatggaa

SEQ ID NO: 1883303 - DNA, 15 bp, Homo sapiens
gctgtgtgatggaat

SEQ ID NO: 1883304 - DNA, 15 bp, Homo sapiens
ctgtgtgatggaatc

SEQ ID NO: 1883305 - DNA, 15 bp, Homo sapiens
tgtgtgatggaatca

SEQ ID NO: 1883306 - DNA, 15 bp, Homo sapiens
gtgtgatggaatcaa

SEQ ID NO: 1883307 - DNA, 15 bp, Homo sapiens
tgtgatggaatcaat

SEQ ID NO: 1883308 - DNA, 15 bp, Homo sapiens
gtgatggaatcaatg

SEQ ID NO: 1883309 - DNA, 15 bp, Homo sapiens
tgatggaatcaatga

SEQ ID NO: 1883310 - DNA, 15 bp, Homo sapiens
gatggaatcaatgaa

SEQ ID NO: 1883311 - DNA, 15 bp, Homo sapiens
atggaatcaatgaac

SEQ ID NO: 1883312 - DNA, 15 bp, Homo sapiens
tggaatcaatgaact

SEQ ID NO: 1883313 - DNA, 15 bp, Homo sapiens
ggaatcaatgaacta

SEQ ID NO: 1883314 - DNA, 15 bp, Homo sapiens
gaatcaatgaactaa

SEQ ID NO: 1883315 - DNA, 15 bp, Homo sapiens
aatcaatgaactaag

SEQ ID NO: 1883316 - DNA, 15 bp, Homo sapiens
atcaatgaactaagg

SEQ ID NO: 1883317 - DNA, 15 bp, Homo sapiens
tcaatgaactaagga

SEQ ID NO: 1883318 - DNA, 15 bp, Homo sapiens
caatgaactaaggac

SEQ ID NO: 1883319 - DNA, 15 bp, Homo sapiens
aatgaactaaggact

SEQ ID NO: 1883320 - DNA, 15 bp, Homo sapiens
atgaactaaggactg

SEQ ID NO: 1883321 - DNA, 15 bp, Homo sapiens
tgaactaaggactgg

SEQ ID NO: 1883322 - DNA, 15 bp, Homo sapiens
gaactaaggactggc

SEQ ID NO: 1883323 - DNA, 15 bp, Homo sapiens
aactaaggactggca

SEQ ID NO: 1883324 - DNA, 15 bp, Homo sapiens
actaaggactggcag

SEQ ID NO: 1883325 - DNA, 15 bp, Homo sapiens
ctaaggactggcagg

SEQ ID NO: 1883326 - DNA, 15 bp, Homo sapiens
taaggactggcaggt

SEQ ID NO: 1883327 - DNA, 15 bp, Homo sapiens
aaggactggcaggtg

SEQ ID NO: 1883328 - DNA, 15 bp, Homo sapiens
aggactggcaggtgc

SEQ ID NO: 1883329 - DNA, 15 bp, Homo sapiens
ggactggcaggtgct

SEQ ID NO: 1883330 - DNA, 15 bp, Homo sapiens
gactggcaggtgctc

SEQ ID NO: 1883331 - DNA, 15 bp, Homo sapiens
actggcaggtgctcc

SEQ ID NO: 1883332 - DNA, 15 bp, Homo sapiens
ctggcaggtgctcca

SEQ ID NO: 1883333 - DNA, 15 bp, Homo sapiens
tggcaggtgctccag

SEQ ID NO: 1883334 - DNA, 15 bp, Homo sapiens
ggcaggtgctccagc

SEQ ID NO: 1883335 - DNA, 15 bp, Homo sapiens
gcaggtgctccagca

SEQ ID NO: 1883336 - DNA, 15 bp, Homo sapiens
caggtgctccagcag

SEQ ID NO: 1883337 - DNA, 15 bp, Homo sapiens
aggtgctccagcagc

SEQ ID NO: 1883338 - DNA, 15 bp, Homo sapiens
ggtgctccagcagca

SEQ ID NO: 1883339 - DNA, 15 bp, Homo sapiens
gtgctccagcagcac

SEQ ID NO: 1883340 - DNA, 15 bp, Homo sapiens
tgctccagcagcaca

SEQ ID NO: 1883341 - DNA, 15 bp, Homo sapiens
gctccagcagcacaa

SEQ ID NO: 1883342 - DNA, 15 bp, Homo sapiens
ctccagcagcacaat

SEQ ID NO: 1883343 - DNA, 15 bp, Homo sapiens
tccagcagcacaata

SEQ ID NO: 1883344 - DNA, 15 bp, Homo sapiens
ccagcagcacaatat

SEQ ID NO: 1883345 - DNA, 15 bp, Homo sapiens
cagcagcacaatata

SEQ ID NO: 1883346 - DNA, 15 bp, Homo sapiens
agcagcacaatatag

SEQ ID NO: 1883347 - DNA, 15 bp, Homo sapiens
gcagcacaatataga

SEQ ID NO: 1883348 - DNA, 15 bp, Homo sapiens
cagcacaatatagaa

SEQ ID NO: 1883349 - DNA, 15 bp, Homo sapiens
agcacaatatagaaa

SEQ ID NO: 1883350 - DNA, 15 bp, Homo sapiens
gcacaatatagaaag

SEQ ID NO: 1883351 - DNA, 15 bp, Homo sapiens
cacaatatagaaagc

SEQ ID NO: 1883352 - DNA, 15 bp, Homo sapiens
acaatatagaaagca

SEQ ID NO: 1883353 - DNA, 15 bp, Homo sapiens
caatatagaaagcag

SEQ ID NO: 1883354 - DNA, 15 bp, Homo sapiens
aatatagaaagcaga

SEQ ID NO: 1883355 - DNA, 15 bp, Homo sapiens
atatagaaagcagaa

SEQ ID NO: 1883356 - DNA, 15 bp, Homo sapiens
tatagaaagcagaaa

SEQ ID NO: 1883357 - DNA, 15 bp, Homo sapiens
atagaaagcagaaaa

SEQ ID NO: 1883358 - DNA, 15 bp, Homo sapiens
tagaaagcagaaaaa

SEQ ID NO: 1883359 - DNA, 15 bp, Homo sapiens
agaaagcagaaaaat

SEQ ID NO: 1883360 - DNA, 15 bp, Homo sapiens
gaaagcagaaaaatg

SEQ ID NO: 1883361 - DNA, 15 bp, Homo sapiens
aaagcagaaaaatga

SEQ ID NO: 1883362 - DNA, 15 bp, Homo sapiens
aagcagaaaaatgac

SEQ ID NO: 1883363 - DNA, 15 bp, Homo sapiens
agcagaaaaatgact

SEQ ID NO: 1883364 - DNA, 15 bp, Homo sapiens
gcagaaaaatgactt

SEQ ID NO: 1883365 - DNA, 15 bp, Homo sapiens
cagaaaaatgacttg

SEQ ID NO: 1883366 - DNA, 15 bp, Homo sapiens
agaaaaatgacttgg

SEQ ID NO: 1883367 - DNA, 15 bp, Homo sapiens
gaaaaatgacttggg

SEQ ID NO: 1883368 - DNA, 15 bp, Homo sapiens
aaaaatgacttgggg

SEQ ID NO: 1883369 - DNA, 15 bp, Homo sapiens
aaaatgacttggggc

SEQ ID NO: 1883370 - DNA, 15 bp, Homo sapiens
aaatgacttggggca

SEQ ID NO: 1883371 - DNA, 15 bp, Homo sapiens
aatgacttggggcac

SEQ ID NO: 1883372 - DNA, 15 bp, Homo sapiens
atgacttggggcaca

SEQ ID NO: 1883373 - DNA, 15 bp, Homo sapiens
tgacttggggcacag

SEQ ID NO: 1883374 - DNA, 15 bp, Homo sapiens
gacttggggcacaga

SEQ ID NO: 1883375 - DNA, 15 bp, Homo sapiens
acttggggcacagaa

SEQ ID NO: 1883376 - DNA, 15 bp, Homo sapiens
cttggggcacagaat

SEQ ID NO: 1883377 - DNA, 15 bp, Homo sapiens
ttggggcacagaatt

SEQ ID NO: 1883378 - DNA, 15 bp, Homo sapiens
tggggcacagaattt

SEQ ID NO: 1883379 - DNA, 15 bp, Homo sapiens
ggggcacagaatttt

SEQ ID NO: 1883380 - DNA, 15 bp, Homo sapiens
gggcacagaattttc

SEQ ID NO: 1883381 - DNA, 15 bp, Homo sapiens
ggcacagaattttct

SEQ ID NO: 1883382 - DNA, 15 bp, Homo sapiens
gcacagaattttctg

SEQ ID NO: 1883383 - DNA, 15 bp, Homo sapiens
cacagaattttctgg

SEQ ID NO: 1883384 - DNA, 15 bp, Homo sapiens
acagaattttctggg

SEQ ID NO: 1883385 - DNA, 15 bp, Homo sapiens
cagaattttctgggt

SEQ ID NO: 1883386 - DNA, 15 bp, Homo sapiens
agaattttctgggtc

SEQ ID NO: 1883387 - DNA, 15 bp, Homo sapiens
gaattttctgggtcc

SEQ ID NO: 1883388 - DNA, 15 bp, Homo sapiens
aattttctgggtcct

SEQ ID NO: 1883389 - DNA, 15 bp, Homo sapiens
attttctgggtcctt

SEQ ID NO: 1883390 - DNA, 15 bp, Homo sapiens
ttttctgggtccttt

SEQ ID NO: 1883391 - DNA, 15 bp, Homo sapiens
tttctgggtcctttg

SEQ ID NO: 1883392 - DNA, 15 bp, Homo sapiens
ttctgggtcctttgg

SEQ ID NO: 1883393 - DNA, 15 bp, Homo sapiens
tctgggtcctttgga

SEQ ID NO: 1883394 - DNA, 15 bp, Homo sapiens
ctgggtcctttggag

SEQ ID NO: 1883395 - DNA, 15 bp, Homo sapiens
tgggtcctttggagt

SEQ ID NO: 1883396 - DNA, 15 bp, Homo sapiens
gggtcctttggagtc

SEQ ID NO: 1883397 - DNA, 15 bp, Homo sapiens
ggtcctttggagtct

SEQ ID NO: 1883398 - DNA, 15 bp, Homo sapiens
gtcctttggagtctt

SEQ ID NO: 1883399 - DNA, 15 bp, Homo sapiens
tcctttggagtcttc

SEQ ID NO: 1883400 - DNA, 15 bp, Homo sapiens
cctttggagtcttct

SEQ ID NO: 1883401 - DNA, 15 bp, Homo sapiens
ctttggagtcttctc

SEQ ID NO: 1883402 - DNA, 15 bp, Homo sapiens
tttggagtcttctct

SEQ ID NO: 1883403 - DNA, 15 bp, Homo sapiens
ttggagtcttctctt

SEQ ID NO: 1883404 - DNA, 15 bp, Homo sapiens
tggagtcttctcttc

SEQ ID NO: 1883405 - DNA, 15 bp, Homo sapiens
ggagtcttctcttct

SEQ ID NO: 1883406 - DNA, 15 bp, Homo sapiens
gagtcttctcttcta

SEQ ID NO: 1883407 - DNA, 15 bp, Homo sapiens
agtcttctcttctaa

SEQ ID NO: 1883408 - DNA, 15 bp, Homo sapiens
gtcttctcttctaat

SEQ ID NO: 1883409 - DNA, 15 bp, Homo sapiens
tcttctcttctaata

SEQ ID NO: 1883410 - DNA, 15 bp, Homo sapiens
cttctcttctaataa

SEQ ID NO: 1883411 - DNA, 15 bp, Homo sapiens
ttctcttctaataaa

SEQ ID NO: 1883412 - DNA, 15 bp, Homo sapiens
tctcttctaataaat

SEQ ID NO: 1883413 - DNA, 15 bp, Homo sapiens
ctcttctaataaatg

SEQ ID NO: 1883414 - DNA, 15 bp, Homo sapiens
tcttctaataaatgc

SEQ ID NO: 1883415 - DNA, 15 bp, Homo sapiens
cttctaataaatgca

SEQ ID NO: 1883416 - DNA, 15 bp, Homo sapiens
ttctaataaatgcaa

SEQ ID NO: 1883417 - DNA, 15 bp, Homo sapiens
tctaataaatgcaaa

SEQ ID NO: 1883418 - DNA, 15 bp, Homo sapiens
ctaataaatgcaaag

SEQ ID NO: 1883419 - DNA, 15 bp, Homo sapiens
taataaatgcaaagc

SEQ ID NO: 1883420 - DNA, 15 bp, Homo sapiens
aataaatgcaaagcc

SEQ ID NO: 1883421 - DNA, 15 bp, Homo sapiens
ataaatgcaaagcca

SEQ ID NO: 1883422 - DNA, 15 bp, Homo sapiens
taaatgcaaagccat

SEQ ID NO: 1883423 - DNA, 15 bp, Homo sapiens
aaatgcaaagccatg

SEQ ID NO: 1883424 - DNA, 15 bp, Homo sapiens
aatgcaaagccatga

SEQ ID NO: 1883425 - DNA, 15 bp, Homo sapiens
atgcaaagccatgaa

SEQ ID NO: 1883426 - DNA, 15 bp, Homo sapiens
tgcaaagccatgaat

SEQ ID NO: 1883427 - DNA, 15 bp, Homo sapiens
gcaaagccatgaatc

SEQ ID NO: 1883428 - DNA, 15 bp, Homo sapiens
caaagccatgaatct

SEQ ID NO: 1883429 - DNA, 15 bp, Homo sapiens
aaagccatgaatcta

SEQ ID NO: 1883430 - DNA, 15 bp, Homo sapiens
aagccatgaatctat

SEQ ID NO: 1883431 - DNA, 15 bp, Homo sapiens
agccatgaatctatt

SEQ ID NO: 1883432 - DNA, 15 bp, Homo sapiens
gccatgaatctattg

SEQ ID NO: 1883433 - DNA, 15 bp, Homo sapiens
ccatgaatctattga

SEQ ID NO: 1883434 - DNA, 15 bp, Homo sapiens
catgaatctattgag

SEQ ID NO: 1883435 - DNA, 15 bp, Homo sapiens
atgaatctattgagg

SEQ ID NO: 1883436 - DNA, 15 bp, Homo sapiens
tgaatctattgaggg

SEQ ID NO: 1883437 - DNA, 15 bp, Homo sapiens
gaatctattgagggc

SEQ ID NO: 1883438 - DNA, 15 bp, Homo sapiens
aatctattgagggcc

SEQ ID NO: 1883439 - DNA, 15 bp, Homo sapiens
atctattgagggcct

SEQ ID NO: 1883440 - DNA, 15 bp, Homo sapiens
tctattgagggcctt

SEQ ID NO: 1883441 - DNA, 15 bp, Homo sapiens
ctattgagggccttg

SEQ ID NO: 1883442 - DNA, 15 bp, Homo sapiens
tattgagggccttgt

SEQ ID NO: 1883443 - DNA, 15 bp, Homo sapiens
attgagggccttgtt

SEQ ID NO: 1883444 - DNA, 15 bp, Homo sapiens
ttgagggccttgttg

SEQ ID NO: 1883445 - DNA, 15 bp, Homo sapiens
tgagggccttgttga

SEQ ID NO: 1883446 - DNA, 15 bp, Homo sapiens
gagggccttgttgag

SEQ ID NO: 1883447 - DNA, 15 bp, Homo sapiens
agggccttgttgagt

SEQ ID NO: 1883448 - DNA, 15 bp, Homo sapiens
gggccttgttgagtg

SEQ ID NO: 1883449 - DNA, 15 bp, Homo sapiens
ggccttgttgagtgg

SEQ ID NO: 1883450 - DNA, 15 bp, Homo sapiens
gccttgttgagtggt

SEQ ID NO: 1883451 - DNA, 15 bp, Homo sapiens
ccttgttgagtggtc

SEQ ID NO: 1883452 - DNA, 15 bp, Homo sapiens
cttgttgagtggtca

SEQ ID NO: 1883453 - DNA, 15 bp, Homo sapiens
ttgttgagtggtcag

SEQ ID NO: 1883454 - DNA, 15 bp, Homo sapiens
tgttgagtggtcagg

SEQ ID NO: 1883455 - DNA, 15 bp, Homo sapiens
gttgagtggtcagga

SEQ ID NO: 1883456 - DNA, 15 bp, Homo sapiens
ttgagtggtcaggat

SEQ ID NO: 1883457 - DNA, 15 bp, Homo sapiens
tgagtggtcaggatt

SEQ ID NO: 1883458 - DNA, 15 bp, Homo sapiens
gagtggtcaggattg

SEQ ID NO: 1883459 - DNA, 15 bp, Homo sapiens
agtggtcaggattgt

SEQ ID NO: 1883460 - DNA, 15 bp, Homo sapiens
gtggtcaggattgta

SEQ ID NO: 1883461 - DNA, 15 bp, Homo sapiens
tggtcaggattgtac

SEQ ID NO: 1883462 - DNA, 15 bp, Homo sapiens
ggtcaggattgtaca

SEQ ID NO: 1883463 - DNA, 15 bp, Homo sapiens
gtcaggattgtacag

SEQ ID NO: 1883464 - DNA, 15 bp, Homo sapiens
tcaggattgtacagt

SEQ ID NO: 1883465 - DNA, 15 bp, Homo sapiens
caggattgtacagtg

SEQ ID NO: 1883466 - DNA, 15 bp, Homo sapiens
aggattgtacagtga

SEQ ID NO: 1883467 - DNA, 15 bp, Homo sapiens
ggattgtacagtgag

SEQ ID NO: 1883468 - DNA, 15 bp, Homo sapiens
gattgtacagtgagc

SEQ ID NO: 1883469 - DNA, 15 bp, Homo sapiens
attgtacagtgagca

SEQ ID NO: 1883470 - DNA, 15 bp, Homo sapiens
ttgtacagtgagcag

SEQ ID NO: 1883471 - DNA, 15 bp, Homo sapiens
tgtacagtgagcagt

SEQ ID NO: 1883472 - DNA, 15 bp, Homo sapiens
gtacagtgagcagta

SEQ ID NO: 1883473 - DNA, 15 bp, Homo sapiens
tacagtgagcagtac

SEQ ID NO: 1883474 - DNA, 15 bp, Homo sapiens
acagtgagcagtacc

SEQ ID NO: 1883475 - DNA, 15 bp, Homo sapiens
cagtgagcagtaccc

SEQ ID NO: 1883476 - DNA, 15 bp, Homo sapiens
agtgagcagtaccct

SEQ ID NO: 1883477 - DNA, 15 bp, Homo sapiens
gtgagcagtaccctt

SEQ ID NO: 1883478 - DNA, 15 bp, Homo sapiens
tgagcagtacccttc

SEQ ID NO: 1883479 - DNA, 15 bp, Homo sapiens
gagcagtacccttca

SEQ ID NO: 1883480 - DNA, 15 bp, Homo sapiens
agcagtacccttcat

SEQ ID NO: 1883481 - DNA, 15 bp, Homo sapiens
gcagtacccttcatc

SEQ ID NO: 1883482 - DNA, 15 bp, Homo sapiens
cagtacccttcatca

SEQ ID NO: 1883483 - DNA, 15 bp, Homo sapiens
agtacccttcatcat

SEQ ID NO: 1883484 - DNA, 15 bp, Homo sapiens
gtacccttcatcatg

SEQ ID NO: 1883485 - DNA, 15 bp, Homo sapiens
tacccttcatcatga

SEQ ID NO: 1883486 - DNA, 15 bp, Homo sapiens
acccttcatcatgat

SEQ ID NO: 1883487 - DNA, 15 bp, Homo sapiens
cccttcatcatgatg

SEQ ID NO: 1883488 - DNA, 15 bp, Homo sapiens
ccttcatcatgatga

SEQ ID NO: 1883489 - DNA, 15 bp, Homo sapiens
cttcatcatgatgat

SEQ ID NO: 1883490 - DNA, 15 bp, Homo sapiens
ttcatcatgatgatt

SEQ ID NO: 1883491 - DNA, 15 bp, Homo sapiens
tcatcatgatgattt

SEQ ID NO: 1883492 - DNA, 15 bp, Homo sapiens
catcatgatgattta

SEQ ID NO: 1883493 - DNA, 15 bp, Homo sapiens
atcatgatgatttac

SEQ ID NO: 1883494 - DNA, 15 bp, Homo sapiens
tcatgatgatttaca

SEQ ID NO: 1883495 - DNA, 15 bp, Homo sapiens
catgatgatttacag

SEQ ID NO: 1883496 - DNA, 15 bp, Homo sapiens
atgatgatttacagt

SEQ ID NO: 1883497 - DNA, 15 bp, Homo sapiens
tgatgatttacagta

SEQ ID NO: 1883498 - DNA, 15 bp, Homo sapiens
gatgatttacagtac

SEQ ID NO: 1883499 - DNA, 15 bp, Homo sapiens
atgatttacagtact

SEQ ID NO: 1883500 - DNA, 15 bp, Homo sapiens
tgatttacagtactt

SEQ ID NO: 1883501 - DNA, 15 bp, Homo sapiens
gatttacagtacttt

SEQ ID NO: 1883502 - DNA, 15 bp, Homo sapiens
atttacagtactttc

SEQ ID NO: 1883503 - DNA, 15 bp, Homo sapiens
tttacagtactttct

SEQ ID NO: 1883504 - DNA, 15 bp, Homo sapiens
ttacagtactttcta

SEQ ID NO: 1883505 - DNA, 15 bp, Homo sapiens
tacagtactttctac

SEQ ID NO: 1883506 - DNA, 15 bp, Homo sapiens
acagtactttctacc

SEQ ID NO: 1883507 - DNA, 15 bp, Homo sapiens
cagtactttctacca

SEQ ID NO: 1883508 - DNA, 15 bp, Homo sapiens
agtactttctaccaa

SEQ ID NO: 1883509 - DNA, 15 bp, Homo sapiens
gtactttctaccaac

SEQ ID NO: 1883510 - DNA, 15 bp, Homo sapiens
tactttctaccaact

SEQ ID NO: 1883511 - DNA, 15 bp, Homo sapiens
actttctaccaactg

SEQ ID NO: 1883512 - DNA, 15 bp, Homo sapiens
ctttctaccaactgt

SEQ ID NO: 1883513 - DNA, 15 bp, Homo sapiens
tttctaccaactgtc

SEQ ID NO: 1883514 - DNA, 15 bp, Homo sapiens
ttctaccaactgtct

SEQ ID NO: 1883515 - DNA, 15 bp, Homo sapiens
tctaccaactgtcta

SEQ ID NO: 1883516 - DNA, 15 bp, Homo sapiens
ctaccaactgtctag

SEQ ID NO: 1883517 - DNA, 15 bp, Homo sapiens
taccaactgtctagt

SEQ ID NO: 1883518 - DNA, 15 bp, Homo sapiens
accaactgtctagta

SEQ ID NO: 1883519 - DNA, 15 bp, Homo sapiens
ccaactgtctagtaa

SEQ ID NO: 1883520 - DNA, 15 bp, Homo sapiens
caactgtctagtaac

SEQ ID NO: 1883521 - DNA, 15 bp, Homo sapiens
aactgtctagtaaca

SEQ ID NO: 1883522 - DNA, 15 bp, Homo sapiens
actgtctagtaacag

SEQ ID NO: 1883523 - DNA, 15 bp, Homo sapiens
ctgtctagtaacagg

SEQ ID NO: 1883524 - DNA, 15 bp, Homo sapiens
tgtctagtaacaggc

SEQ ID NO: 1883525 - DNA, 15 bp, Homo sapiens
gtctagtaacaggca

SEQ ID NO: 1883526 - DNA, 15 bp, Homo sapiens
tctagtaacaggcaa

SEQ ID NO: 1883527 - DNA, 15 bp, Homo sapiens
ctagtaacaggcaaa

SEQ ID NO: 1883528 - DNA, 15 bp, Homo sapiens
tagtaacaggcaaaa

SEQ ID NO: 1883529 - DNA, 15 bp, Homo sapiens
agtaacaggcaaaat

SEQ ID NO: 1883530 - DNA, 15 bp, Homo sapiens
gtaacaggcaaaatg

SEQ ID NO: 1883531 - DNA, 15 bp, Homo sapiens
taacaggcaaaatgc

SEQ ID NO: 1883532 - DNA, 15 bp, Homo sapiens
aacaggcaaaatgct

SEQ ID NO: 1883533 - DNA, 15 bp, Homo sapiens
acaggcaaaatgctg

SEQ ID NO: 1883534 - DNA, 15 bp, Homo sapiens
caggcaaaatgctgt

SEQ ID NO: 1883535 - DNA, 15 bp, Homo sapiens
aggcaaaatgctgta

SEQ ID NO: 1883536 - DNA, 15 bp, Homo sapiens
ggcaaaatgctgtag

SEQ ID NO: 1883537 - DNA, 15 bp, Homo sapiens
gcaaaatgctgtagt

SEQ ID NO: 1883538 - DNA, 15 bp, Homo sapiens
caaaatgctgtagta

SEQ ID NO: 1883539 - DNA, 15 bp, Homo sapiens
aaaatgctgtagtaa

SEQ ID NO: 1883540 - DNA, 15 bp, Homo sapiens
aaatgctgtagtaac

SEQ ID NO: 1883541 - DNA, 15 bp, Homo sapiens
aatgctgtagtaacc

SEQ ID NO: 1883542 - DNA, 15 bp, Homo sapiens
atgctgtagtaacct

SEQ ID NO: 1883543 - DNA, 15 bp, Homo sapiens
tgctgtagtaacctg

SEQ ID NO: 1883544 - DNA, 15 bp, Homo sapiens
gctgtagtaacctga

SEQ ID NO: 1883545 - DNA, 15 bp, Homo sapiens
ctgtagtaacctgaa

SEQ ID NO: 1883546 - DNA, 15 bp, Homo sapiens
tgtagtaacctgaat

SEQ ID NO: 1883547 - DNA, 15 bp, Homo sapiens
gtagtaacctgaatt

SEQ ID NO: 1883548 - DNA, 15 bp, Homo sapiens
tagtaacctgaatta

SEQ ID NO: 1883549 - DNA, 15 bp, Homo sapiens
agtaacctgaattat

SEQ ID NO: 1883550 - DNA, 15 bp, Homo sapiens
gtaacctgaattata

SEQ ID NO: 1883551 - DNA, 15 bp, Homo sapiens
taacctgaattatag

SEQ ID NO: 1883552 - DNA, 15 bp, Homo sapiens
aacctgaattataga

SEQ ID NO: 1883553 - DNA, 15 bp, Homo sapiens
acctgaattatagac

SEQ ID NO: 1883554 - DNA, 15 bp, Homo sapiens
cctgaattatagact

SEQ ID NO: 1883555 - DNA, 15 bp, Homo sapiens
ctgaattatagactg

SEQ ID NO: 1883556 - DNA, 15 bp, Homo sapiens
tgaattatagactgg

SEQ ID NO: 1883557 - DNA, 15 bp, Homo sapiens
gaattatagactggc

SEQ ID NO: 1883558 - DNA, 15 bp, Homo sapiens
aattatagactggca

SEQ ID NO: 1883559 - DNA, 15 bp, Homo sapiens
attatagactggcat

SEQ ID NO: 1883560 - DNA, 15 bp, Homo sapiens
ttatagactggcata

SEQ ID NO: 1883561 - DNA, 15 bp, Homo sapiens
tatagactggcataa

SEQ ID NO: 1883562 - DNA, 15 bp, Homo sapiens
atagactggcataaa

SEQ ID NO: 1883563 - DNA, 15 bp, Homo sapiens
tagactggcataaag

SEQ ID NO: 1883564 - DNA, 15 bp, Homo sapiens
agactggcataaagt

SEQ ID NO: 1883565 - DNA, 15 bp, Homo sapiens
gactggcataaagtg

SEQ ID NO: 1883566 - DNA, 15 bp, Homo sapiens
actggcataaagtgg

SEQ ID NO: 1883567 - DNA, 15 bp, Homo sapiens
ctggcataaagtggg

SEQ ID NO: 1883568 - DNA, 15 bp, Homo sapiens
tggcataaagtgggg

SEQ ID NO: 1883569 - DNA, 15 bp, Homo sapiens
ggcataaagtggggt

SEQ ID NO: 1883570 - DNA, 15 bp, Homo sapiens
gcataaagtggggtg

SEQ ID NO: 1883571 - DNA, 15 bp, Homo sapiens
cataaagtggggtgc

SEQ ID NO: 1883572 - DNA, 15 bp, Homo sapiens
ataaagtggggtgcc

SEQ ID NO: 1883573 - DNA, 15 bp, Homo sapiens
taaagtggggtgcct

SEQ ID NO: 1883574 - DNA, 15 bp, Homo sapiens
aaagtggggtgcctc

SEQ ID NO: 1883575 - DNA, 15 bp, Homo sapiens
aagtggggtgcctca

SEQ ID NO: 1883576 - DNA, 15 bp, Homo sapiens
agtggggtgcctcat

SEQ ID NO: 1883577 - DNA, 15 bp, Homo sapiens
gtggggtgcctcatg

SEQ ID NO: 1883578 - DNA, 15 bp, Homo sapiens
tggggtgcctcatgg

SEQ ID NO: 1883579 - DNA, 15 bp, Homo sapiens
ggggtgcctcatggc

SEQ ID NO: 1883580 - DNA, 15 bp, Homo sapiens
gggtgcctcatggca

SEQ ID NO: 1883581 - DNA, 15 bp, Homo sapiens
ggtgcctcatggcag

SEQ ID NO: 1883582 - DNA, 15 bp, Homo sapiens
gtgcctcatggcagc

SEQ ID NO: 1883583 - DNA, 15 bp, Homo sapiens
tgcctcatggcagca

SEQ ID NO: 1883584 - DNA, 15 bp, Homo sapiens
gcctcatggcagcat

SEQ ID NO: 1883585 - DNA, 15 bp, Homo sapiens
cctcatggcagcatg

SEQ ID NO: 1883586 - DNA, 15 bp, Homo sapiens
ctcatggcagcatgt

SEQ ID NO: 1883587 - DNA, 15 bp, Homo sapiens
tcatggcagcatgtg

SEQ ID NO: 1883588 - DNA, 15 bp, Homo sapiens
catggcagcatgtga

SEQ ID NO: 1883589 - DNA, 15 bp, Homo sapiens
atggcagcatgtgag

SEQ ID NO: 1883590 - DNA, 15 bp, Homo sapiens
tggcagcatgtgagg

SEQ ID NO: 1883591 - DNA, 15 bp, Homo sapiens
ggcagcatgtgaggt

SEQ ID NO: 1883592 - DNA, 15 bp, Homo sapiens
gcagcatgtgaggtg

SEQ ID NO: 1883593 - DNA, 15 bp, Homo sapiens
cagcatgtgaggtgt

SEQ ID NO: 1883594 - DNA, 15 bp, Homo sapiens
agcatgtgaggtgtg

SEQ ID NO: 1883595 - DNA, 15 bp, Homo sapiens
gcatgtgaggtgtgc

SEQ ID NO: 1883596 - DNA, 15 bp, Homo sapiens
catgtgaggtgtgct

SEQ ID NO: 1883597 - DNA, 15 bp, Homo sapiens
atgtgaggtgtgctg

SEQ ID NO: 1883598 - DNA, 15 bp, Homo sapiens
tgtgaggtgtgctgc

SEQ ID NO: 1883599 - DNA, 15 bp, Homo sapiens
gtgaggtgtgctgcc

SEQ ID NO: 1883600 - DNA, 15 bp, Homo sapiens
tgaggtgtgctgccc

SEQ ID NO: 1883601 - DNA, 15 bp, Homo sapiens
gaggtgtgctgccca

SEQ ID NO: 1883602 - DNA, 15 bp, Homo sapiens
aggtgtgctgcccat

SEQ ID NO: 1883603 - DNA, 15 bp, Homo sapiens
ggtgtgctgcccatg

SEQ ID NO: 1883604 - DNA, 15 bp, Homo sapiens
gtgtgctgcccatgg

SEQ ID NO: 1883605 - DNA, 15 bp, Homo sapiens
tgtgctgcccatggg

SEQ ID NO: 1883606 - DNA, 15 bp, Homo sapiens
gtgctgcccatggga

SEQ ID NO: 1883607 - DNA, 15 bp, Homo sapiens
tgctgcccatgggag

SEQ ID NO: 1883608 - DNA, 15 bp, Homo sapiens
gctgcccatgggagg

SEQ ID NO: 1883609 - DNA, 15 bp, Homo sapiens
ctgcccatgggaggg

SEQ ID NO: 1883610 - DNA, 15 bp, Homo sapiens
tgcccatgggaggga

SEQ ID NO: 1883611 - DNA, 15 bp, Homo sapiens
gcccatgggagggat

SEQ ID NO: 1883612 - DNA, 15 bp, Homo sapiens
cccatgggagggatg

SEQ ID NO: 1883613 - DNA, 15 bp, Homo sapiens
ccatgggagggatgt

SEQ ID NO: 1883614 - DNA, 15 bp, Homo sapiens
catgggagggatgtg

SEQ ID NO: 1883615 - DNA, 15 bp, Homo sapiens
atgggagggatgtgc

SEQ ID NO: 1883616 - DNA, 15 bp, Homo sapiens
tgggagggatgtgca

SEQ ID NO: 1883617 - DNA, 15 bp, Homo sapiens
gggagggatgtgcat

SEQ ID NO: 1883618 - DNA, 15 bp, Homo sapiens
ggagggatgtgcatc

SEQ ID NO: 1883619 - DNA, 15 bp, Homo sapiens
gagggatgtgcatca

SEQ ID NO: 1883620 - DNA, 15 bp, Homo sapiens
agggatgtgcatcat

SEQ ID NO: 1883621 - DNA, 15 bp, Homo sapiens
gggatgtgcatcatt

SEQ ID NO: 1883622 - DNA, 15 bp, Homo sapiens
ggatgtgcatcatta

SEQ ID NO: 1883623 - DNA, 15 bp, Homo sapiens
gatgtgcatcattaa

SEQ ID NO: 1883624 - DNA, 15 bp, Homo sapiens
atgtgcatcattaac

SEQ ID NO: 1883625 - DNA, 15 bp, Homo sapiens
tgtgcatcattaaca

SEQ ID NO: 1883626 - DNA, 15 bp, Homo sapiens
gtgcatcattaacat

SEQ ID NO: 1883627 - DNA, 15 bp, Homo sapiens
tgcatcattaacata

SEQ ID NO: 1883628 - DNA, 15 bp, Homo sapiens
gcatcattaacatag

SEQ ID NO: 1883629 - DNA, 15 bp, Homo sapiens
catcattaacatagt

SEQ ID NO: 1883630 - DNA, 15 bp, Homo sapiens
atcattaacatagta

SEQ ID NO: 1883631 - DNA, 15 bp, Homo sapiens
tcattaacatagtaa

SEQ ID NO: 1883632 - DNA, 15 bp, Homo sapiens
cattaacatagtaaa

SEQ ID NO: 1883633 - DNA, 15 bp, Homo sapiens
attaacatagtaaat

SEQ ID NO: 1883634 - DNA, 15 bp, Homo sapiens
ttaacatagtaaatg

SEQ ID NO: 1883635 - DNA, 15 bp, Homo sapiens
taacatagtaaatgg

SEQ ID NO: 1883636 - DNA, 15 bp, Homo sapiens
aacatagtaaatggc

SEQ ID NO: 1883637 - DNA, 15 bp, Homo sapiens
acatagtaaatggca

SEQ ID NO: 1883638 - DNA, 15 bp, Homo sapiens
catagtaaatggcag

SEQ ID NO: 1883639 - DNA, 15 bp, Homo sapiens
atagtaaatggcagc

SEQ ID NO: 1883640 - DNA, 15 bp, Homo sapiens
tagtaaatggcagct

SEQ ID NO: 1883641 - DNA, 15 bp, Homo sapiens
agtaaatggcagctt

SEQ ID NO: 1883642 - DNA, 15 bp, Homo sapiens
gtaaatggcagcttt

SEQ ID NO: 1883643 - DNA, 15 bp, Homo sapiens
taaatggcagctttg

SEQ ID NO: 1883644 - DNA, 15 bp, Homo sapiens
aaatggcagctttgc

SEQ ID NO: 1883645 - DNA, 15 bp, Homo sapiens
aatggcagctttgct

SEQ ID NO: 1883646 - DNA, 15 bp, Homo sapiens
atggcagctttgcta

SEQ ID NO: 1883647 - DNA, 15 bp, Homo sapiens
tggcagctttgctat

SEQ ID NO: 1883648 - DNA, 15 bp, Homo sapiens
ggcagctttgctatt

SEQ ID NO: 1883649 - DNA, 15 bp, Homo sapiens
gcagctttgctatta

SEQ ID NO: 1883650 - DNA, 15 bp, Homo sapiens
cagctttgctattac

SEQ ID NO: 1883651 - DNA, 15 bp, Homo sapiens
agctttgctattact

SEQ ID NO: 1883652 - DNA, 15 bp, Homo sapiens
gctttgctattactt

SEQ ID NO: 1883653 - DNA, 15 bp, Homo sapiens
ctttgctattacttt

SEQ ID NO: 1883654 - DNA, 15 bp, Homo sapiens
tttgctattactttt

SEQ ID NO: 1883655 - DNA, 15 bp, Homo sapiens
ttgctattacttttg

SEQ ID NO: 1883656 - DNA, 15 bp, Homo sapiens
tgctattacttttga

SEQ ID NO: 1883657 - DNA, 15 bp, Homo sapiens
gctattacttttgaa

SEQ ID NO: 1883658 - DNA, 15 bp, Homo sapiens
ctattacttttgaaa

SEQ ID NO: 1883659 - DNA, 15 bp, Homo sapiens
tattacttttgaaaa

SEQ ID NO: 1883660 - DNA, 15 bp, Homo sapiens
attacttttgaaaac

SEQ ID NO: 1883661 - DNA, 15 bp, Homo sapiens
ttacttttgaaaacc

SEQ ID NO: 1883662 - DNA, 15 bp, Homo sapiens
tacttttgaaaacca

SEQ ID NO: 1883663 - DNA, 15 bp, Homo sapiens
acttttgaaaaccaa

SEQ ID NO: 1883664 - DNA, 15 bp, Homo sapiens
cttttgaaaaccaac

SEQ ID NO: 1883665 - DNA, 15 bp, Homo sapiens
ttttgaaaaccaact

SEQ ID NO: 1883666 - DNA, 15 bp, Homo sapiens
tttgaaaaccaactg

SEQ ID NO: 1883667 - DNA, 15 bp, Homo sapiens
ttgaaaaccaactgc

SEQ ID NO: 1883668 - DNA, 15 bp, Homo sapiens
tgaaaaccaactgca

SEQ ID NO: 1883669 - DNA, 15 bp, Homo sapiens
gaaaaccaactgcag

SEQ ID NO: 1883670 - DNA, 15 bp, Homo sapiens
aaaaccaactgcagc

SEQ ID NO: 1883671 - DNA, 15 bp, Homo sapiens
aaaccaactgcagca

SEQ ID NO: 1883672 - DNA, 15 bp, Homo sapiens
aaccaactgcagcag

SEQ ID NO: 1883673 - DNA, 15 bp, Homo sapiens
accaactgcagcagg

SEQ ID NO: 1883674 - DNA, 15 bp, Homo sapiens
ccaactgcagcaggc

SEQ ID NO: 1883675 - DNA, 15 bp, Homo sapiens
caactgcagcaggca

SEQ ID NO: 1883676 - DNA, 15 bp, Homo sapiens
aactgcagcaggcac

SEQ ID NO: 1883677 - DNA, 15 bp, Homo sapiens
actgcagcaggcacc

SEQ ID NO: 1883678 - DNA, 15 bp, Homo sapiens
ctgcagcaggcaccg

SEQ ID NO: 1883679 - DNA, 15 bp, Homo sapiens
tgcagcaggcaccga

SEQ ID NO: 1883680 - DNA, 15 bp, Homo sapiens
gcagcaggcaccgac

SEQ ID NO: 1883681 - DNA, 15 bp, Homo sapiens
cagcaggcaccgact

SEQ ID NO: 1883682 - DNA, 15 bp, Homo sapiens
agcaggcaccgactt

SEQ ID NO: 1883683 - DNA, 15 bp, Homo sapiens
gcaggcaccgactta

SEQ ID NO: 1883684 - DNA, 15 bp, Homo sapiens
caggcaccgacttag

SEQ ID NO: 1883685 - DNA, 15 bp, Homo sapiens
aggcaccgacttagg

SEQ ID NO: 1883686 - DNA, 15 bp, Homo sapiens
ggcaccgacttaggt

SEQ ID NO: 1883687 - DNA, 15 bp, Homo sapiens
gcaccgacttaggtg

SEQ ID NO: 1883688 - DNA, 15 bp, Homo sapiens
caccgacttaggtgt

SEQ ID NO: 1883689 - DNA, 15 bp, Homo sapiens
accgacttaggtgtt

SEQ ID NO: 1883690 - DNA, 15 bp, Homo sapiens
ccgacttaggtgttt

SEQ ID NO: 1883691 - DNA, 15 bp, Homo sapiens
cgacttaggtgtttt

SEQ ID NO: 1883692 - DNA, 15 bp, Homo sapiens
gacttaggtgtttta

SEQ ID NO: 1883693 - DNA, 15 bp, Homo sapiens
acttaggtgttttac

SEQ ID NO: 1883694 - DNA, 15 bp, Homo sapiens
cttaggtgttttaca

SEQ ID NO: 1883695 - DNA, 15 bp, Homo sapiens
ttaggtgttttacat

SEQ ID NO: 1883696 - DNA, 15 bp, Homo sapiens
taggtgttttacatg

SEQ ID NO: 1883697 - DNA, 15 bp, Homo sapiens
aggtgttttacatgg

SEQ ID NO: 1883698 - DNA, 15 bp, Homo sapiens
ggtgttttacatggg

SEQ ID NO: 1883699 - DNA, 15 bp, Homo sapiens
gtgttttacatgggg

SEQ ID NO: 1883700 - DNA, 15 bp, Homo sapiens
tgttttacatggggt

SEQ ID NO: 1883701 - DNA, 15 bp, Homo sapiens
gttttacatggggtt

SEQ ID NO: 1883702 - DNA, 15 bp, Homo sapiens
ttttacatggggtta

SEQ ID NO: 1883703 - DNA, 15 bp, Homo sapiens
tttacatggggttag

SEQ ID NO: 1883704 - DNA, 15 bp, Homo sapiens
ttacatggggttagt

SEQ ID NO: 1883705 - DNA, 15 bp, Homo sapiens
tacatggggttagta

SEQ ID NO: 1883706 - DNA, 15 bp, Homo sapiens
acatggggttagtat

SEQ ID NO: 1883707 - DNA, 15 bp, Homo sapiens
catggggttagtatg

SEQ ID NO: 1883708 - DNA, 15 bp, Homo sapiens
atggggttagtatga

SEQ ID NO: 1883709 - DNA, 15 bp, Homo sapiens
tggggttagtatgaa

SEQ ID NO: 1883710 - DNA, 15 bp, Homo sapiens
ggggttagtatgaaa

SEQ ID NO: 1883711 - DNA, 15 bp, Homo sapiens
gggttagtatgaaaa

SEQ ID NO: 1883712 - DNA, 15 bp, Homo sapiens
ggttagtatgaaaat

SEQ ID NO: 1883713 - DNA, 15 bp, Homo sapiens
gttagtatgaaaatt

SEQ ID NO: 1883714 - DNA, 15 bp, Homo sapiens
ttagtatgaaaattc

SEQ ID NO: 1883715 - DNA, 15 bp, Homo sapiens
tagtatgaaaattca

SEQ ID NO: 1883716 - DNA, 15 bp, Homo sapiens
agtatgaaaattcag

SEQ ID NO: 1883717 - DNA, 15 bp, Homo sapiens
gtatgaaaattcagg

SEQ ID NO: 1883718 - DNA, 15 bp, Homo sapiens
tatgaaaattcagga

SEQ ID NO: 1883719 - DNA, 15 bp, Homo sapiens
atgaaaattcaggac

SEQ ID NO: 1883720 - DNA, 15 bp, Homo sapiens
tgaaaattcaggacc

SEQ ID NO: 1883721 - DNA, 15 bp, Homo sapiens
gaaaattcaggaccc

SEQ ID NO: 1883722 - DNA, 15 bp, Homo sapiens
aaaattcaggaccct

SEQ ID NO: 1883723 - DNA, 15 bp, Homo sapiens
aaattcaggaccctt

SEQ ID NO: 1883724 - DNA, 15 bp, Homo sapiens
aattcaggacccttg

SEQ ID NO: 1883725 - DNA, 15 bp, Homo sapiens
attcaggacccttga

SEQ ID NO: 1883726 - DNA, 15 bp, Homo sapiens
ttcaggacccttgag

SEQ ID NO: 1883727 - DNA, 15 bp, Homo sapiens
tcaggacccttgaga

SEQ ID NO: 1883728 - DNA, 15 bp, Homo sapiens
caggacccttgagat

SEQ ID NO: 1883729 - DNA, 15 bp, Homo sapiens
aggacccttgagata

SEQ ID NO: 1883730 - DNA, 15 bp, Homo sapiens
ggacccttgagataa

SEQ ID NO: 1883731 - DNA, 15 bp, Homo sapiens
gacccttgagataaa

SEQ ID NO: 1883732 - DNA, 15 bp, Homo sapiens
acccttgagataaat

SEQ ID NO: 1883733 - DNA, 15 bp, Homo sapiens
cccttgagataaata

SEQ ID NO: 1883734 - DNA, 15 bp, Homo sapiens
ccttgagataaataa

SEQ ID NO: 1883735 - DNA, 15 bp, Homo sapiens
cttgagataaataac

SEQ ID NO: 1883736 - DNA, 15 bp, Homo sapiens
ttgagataaataaca

SEQ ID NO: 1883737 - DNA, 15 bp, Homo sapiens
tgagataaataacaa

SEQ ID NO: 1883738 - DNA, 15 bp, Homo sapiens
gagataaataacaaa

SEQ ID NO: 1883739 - DNA, 15 bp, Homo sapiens
agataaataacaaat

SEQ ID NO: 1883740 - DNA, 15 bp, Homo sapiens
gataaataacaaata

SEQ ID NO: 1883741 - DNA, 15 bp, Homo sapiens
ataaataacaaatat

SEQ ID NO: 1883742 - DNA, 15 bp, Homo sapiens
taaataacaaatatg

SEQ ID NO: 1883743 - DNA, 15 bp, Homo sapiens
aaataacaaatatga

SEQ ID NO: 1883744 - DNA, 15 bp, Homo sapiens
aataacaaatatgat

SEQ ID NO: 1883745 - DNA, 15 bp, Homo sapiens
ataacaaatatgatt

SEQ ID NO: 1883746 - DNA, 15 bp, Homo sapiens
taacaaatatgattt

SEQ ID NO: 1883747 - DNA, 15 bp, Homo sapiens
aacaaatatgatttc

SEQ ID NO: 1883748 - DNA, 15 bp, Homo sapiens
acaaatatgatttcc

SEQ ID NO: 1883749 - DNA, 15 bp, Homo sapiens
caaatatgatttcca

SEQ ID NO: 1883750 - DNA, 15 bp, Homo sapiens
aaatatgatttccac

SEQ ID NO: 1883751 - DNA, 15 bp, Homo sapiens
aatatgatttccact

SEQ ID NO: 1883752 - DNA, 15 bp, Homo sapiens
atatgatttccactt

SEQ ID NO: 1883753 - DNA, 15 bp, Homo sapiens
tatgatttccactta

SEQ ID NO: 1883754 - DNA, 15 bp, Homo sapiens
atgatttccacttac

SEQ ID NO: 1883755 - DNA, 15 bp, Homo sapiens
tgatttccacttaca

SEQ ID NO: 1883756 - DNA, 15 bp, Homo sapiens
gatttccacttacag

SEQ ID NO: 1883757 - DNA, 15 bp, Homo sapiens
atttccacttacagt

SEQ ID NO: 1883758 - DNA, 15 bp, Homo sapiens
ttccacttacagttg

SEQ ID NO: 1883759 - DNA, 15 bp, Homo sapiens
tccacttacagttga

SEQ ID NO: 1883760 - DNA, 15 bp, Homo sapiens
ccacttacagttgaa

SEQ ID NO: 1883761 - DNA, 15 bp, Homo sapiens
cacttacagttgaag

SEQ ID NO: 1883762 - DNA, 15 bp, Homo sapiens
acttacagttgaaga

SEQ ID NO: 1883763 - DNA, 15 bp, Homo sapiens
cttacagttgaagaa

SEQ ID NO: 1883764 - DNA, 15 bp, Homo sapiens
ttacagttgaagaaa

SEQ ID NO: 1883765 - DNA, 15 bp, Homo sapiens
tacagttgaagaaac

SEQ ID NO: 1883766 - DNA, 15 bp, Homo sapiens
acagttgaagaaacc

SEQ ID NO: 1883767 - DNA, 15 bp, Homo sapiens
cagttgaagaaaccg

SEQ ID NO: 1883768 - DNA, 15 bp, Homo sapiens
agttgaagaaaccga

SEQ ID NO: 1883769 - DNA, 15 bp, Homo sapiens
gttgaagaaaccgac

SEQ ID NO: 1883770 - DNA, 15 bp, Homo sapiens
ttgaagaaaccgacg

SEQ ID NO: 1883771 - DNA, 15 bp, Homo sapiens
tgaagaaaccgacgt

SEQ ID NO: 1883772 - DNA, 15 bp, Homo sapiens
gaagaaaccgacgtt

SEQ ID NO: 1883773 - DNA, 15 bp, Homo sapiens
aagaaaccgacgttc

SEQ ID NO: 1883774 - DNA, 15 bp, Homo sapiens
agaaaccgacgttca

SEQ ID NO: 1883775 - DNA, 15 bp, Homo sapiens
gaaaccgacgttcag

SEQ ID NO: 1883776 - DNA, 15 bp, Homo sapiens
aaaccgacgttcaga

SEQ ID NO: 1883777 - DNA, 15 bp, Homo sapiens
aaccgacgttcagat

SEQ ID NO: 1883778 - DNA, 15 bp, Homo sapiens
accgacgttcagata

SEQ ID NO: 1883779 - DNA, 15 bp, Homo sapiens
ccgacgttcagataa

SEQ ID NO: 1883780 - DNA, 15 bp, Homo sapiens
cgacgttcagataat

SEQ ID NO: 1883781 - DNA, 15 bp, Homo sapiens
gacgttcagataata

SEQ ID NO: 1883782 - DNA, 15 bp, Homo sapiens
acgttcagataataa

SEQ ID NO: 1883783 - DNA, 15 bp, Homo sapiens
cgttcagataataac

SEQ ID NO: 1883784 - DNA, 15 bp, Homo sapiens
gttcagataataact

SEQ ID NO: 1883785 - DNA, 15 bp, Homo sapiens
ttcagataataactc

SEQ ID NO: 1883786 - DNA, 15 bp, Homo sapiens
tcagataataactca

SEQ ID NO: 1883787 - DNA, 15 bp, Homo sapiens
cagataataactcac

SEQ ID NO: 1883788 - DNA, 15 bp, Homo sapiens
agataataactcacc

SEQ ID NO: 1883789 - DNA, 15 bp, Homo sapiens
gataataactcacct

SEQ ID NO: 1883790 - DNA, 15 bp, Homo sapiens
ataataactcacctg

SEQ ID NO: 1883791 - DNA, 15 bp, Homo sapiens
taataactcacctgg

SEQ ID NO: 1883792 - DNA, 15 bp, Homo sapiens
aataactcacctggg

SEQ ID NO: 1883793 - DNA, 15 bp, Homo sapiens
ataactcacctgggg

SEQ ID NO: 1883794 - DNA, 15 bp, Homo sapiens
taactcacctggggt

SEQ ID NO: 1883795 - DNA, 15 bp, Homo sapiens
aactcacctggggtt

SEQ ID NO: 1883796 - DNA, 15 bp, Homo sapiens
actcacctggggtta

SEQ ID NO: 1883797 - DNA, 15 bp, Homo sapiens
ctcacctggggttat

SEQ ID NO: 1883798 - DNA, 15 bp, Homo sapiens
tcacctggggttata

SEQ ID NO: 1883799 - DNA, 15 bp, Homo sapiens
cacctggggttatag

SEQ ID NO: 1883800 - DNA, 15 bp, Homo sapiens
acctggggttataga

SEQ ID NO: 1883801 - DNA, 15 bp, Homo sapiens
cctggggttatagac

SEQ ID NO: 1883802 - DNA, 15 bp, Homo sapiens
ctggggttatagact

SEQ ID NO: 1883803 - DNA, 15 bp, Homo sapiens
tggggttatagactc

SEQ ID NO: 1883804 - DNA, 15 bp, Homo sapiens
ggggttatagactcc

SEQ ID NO: 1883805 - DNA, 15 bp, Homo sapiens
gggttatagactccc

SEQ ID NO: 1883806 - DNA, 15 bp, Homo sapiens
ggttatagactccct

SEQ ID NO: 1883807 - DNA, 15 bp, Homo sapiens
gttatagactccctt

SEQ ID NO: 1883808 - DNA, 15 bp, Homo sapiens
ttatagactcccttc

SEQ ID NO: 1883809 - DNA, 15 bp, Homo sapiens
tatagactcccttct

SEQ ID NO: 1883810 - DNA, 15 bp, Homo sapiens
atagactcccttcta

SEQ ID NO: 1883811 - DNA, 15 bp, Homo sapiens
tagactcccttctag

SEQ ID NO: 1883812 - DNA, 15 bp, Homo sapiens
agactcccttctaga

SEQ ID NO: 1883813 - DNA, 15 bp, Homo sapiens
gactcccttctagat

SEQ ID NO: 1883814 - DNA, 15 bp, Homo sapiens
actcccttctagatc

SEQ ID NO: 1883815 - DNA, 15 bp, Homo sapiens
ctcccttctagatcc

SEQ ID NO: 1883816 - DNA, 15 bp, Homo sapiens
tcccttctagatcca

SEQ ID NO: 1883817 - DNA, 15 bp, Homo sapiens
cccttctagatccat

SEQ ID NO: 1883818 - DNA, 15 bp, Homo sapiens
ccttctagatccatg

SEQ ID NO: 1883819 - DNA, 15 bp, Homo sapiens
cttctagatccatgg

SEQ ID NO: 1883820 - DNA, 15 bp, Homo sapiens
ttctagatccatggt

SEQ ID NO: 1883821 - DNA, 15 bp, Homo sapiens
tctagatccatggtg

SEQ ID NO: 1883822 - DNA, 15 bp, Homo sapiens
ctagatccatggtgt

SEQ ID NO: 1883823 - DNA, 15 bp, Homo sapiens
tagatccatggtgtg

SEQ ID NO: 1883824 - DNA, 15 bp, Homo sapiens
agatccatggtgtgt

SEQ ID NO: 1883825 - DNA, 15 bp, Homo sapiens
gatccatggtgtgta

SEQ ID NO: 1883826 - DNA, 15 bp, Homo sapiens
atccatggtgtgtaa

SEQ ID NO: 1883827 - DNA, 15 bp, Homo sapiens
tccatggtgtgtaaa

SEQ ID NO: 1883828 - DNA, 15 bp, Homo sapiens
atgtatattccaaat

SEQ ID NO: 1883829 - DNA, 15 bp, Homo sapiens
tgtatattccaaatt

SEQ ID NO: 1883830 - DNA, 15 bp, Homo sapiens
gtatattccaaattc

SEQ ID NO: 1883831 - DNA, 15 bp, Homo sapiens
tatattccaaattct

SEQ ID NO: 1883832 - DNA, 15 bp, Homo sapiens
atattccaaattcta

SEQ ID NO: 1883833 - DNA, 15 bp, Homo sapiens
tattccaaattctaa

SEQ ID NO: 1883834 - DNA, 15 bp, Homo sapiens
attccaaattctaaa

SEQ ID NO: 1883835 - DNA, 15 bp, Homo sapiens
ttccaaattctaaat

SEQ ID NO: 1883836 - DNA, 15 bp, Homo sapiens
tccaaattctaaata

SEQ ID NO: 1883837 - DNA, 15 bp, Homo sapiens
ccaaattctaaataa

SEQ ID NO: 1883838 - DNA, 15 bp, Homo sapiens
caaattctaaataat

SEQ ID NO: 1883839 - DNA, 15 bp, Homo sapiens
aaattctaaataatt

SEQ ID NO: 1883840 - DNA, 15 bp, Homo sapiens
aattctaaataattt

SEQ ID NO: 1883841 - DNA, 15 bp, Homo sapiens
attctaaataatttt

SEQ ID NO: 1883842 - DNA, 15 bp, Homo sapiens
ttctaaataatttta

SEQ ID NO: 1883843 - DNA, 15 bp, Homo sapiens
tctaaataattttaa

SEQ ID NO: 1883844 - DNA, 15 bp, Homo sapiens
ctaaataattttaat

SEQ ID NO: 1883845 - DNA, 15 bp, Homo sapiens
taaataattttaata

SEQ ID NO: 1883846 - DNA, 15 bp, Homo sapiens
aaataattttaataa

SEQ ID NO: 1883847 - DNA, 15 bp, Homo sapiens
aataattttaataat

SEQ ID NO: 1883848 - DNA, 15 bp, Homo sapiens
ataattttaataatt

SEQ ID NO: 1883849 - DNA, 15 bp, Homo sapiens
taattttaataattc

SEQ ID NO: 1883850 - DNA, 15 bp, Homo sapiens
aattttaataattct

SEQ ID NO: 1883851 - DNA, 15 bp, Homo sapiens
attttaataattcta

SEQ ID NO: 1883852 - DNA, 15 bp, Homo sapiens
ttttaataattctat

SEQ ID NO: 1883853 - DNA, 15 bp, Homo sapiens
tttaataattctata

SEQ ID NO: 1883854 - DNA, 15 bp, Homo sapiens
ttaataattctatat

SEQ ID NO: 1883855 - DNA, 15 bp, Homo sapiens
taataattctatata

SEQ ID NO: 1883856 - DNA, 15 bp, Homo sapiens
aataattctatataa

SEQ ID NO: 1883857 - DNA, 15 bp, Homo sapiens
ataattctatataaa

SEQ ID NO: 1883858 - DNA, 15 bp, Homo sapiens
taattctatataaat

SEQ ID NO: 1883859 - DNA, 15 bp, Homo sapiens
aattctatataaatg

SEQ ID NO: 1883860 - DNA, 15 bp, Homo sapiens
attctatataaatgt

SEQ ID NO: 1883861 - DNA, 15 bp, Homo sapiens
ttctatataaatgta

SEQ ID NO: 1883862 - DNA, 15 bp, Homo sapiens
tctatataaatgtat

SEQ ID NO: 1883863 - DNA, 15 bp, Homo sapiens
ctatataaatgtata

SEQ ID NO: 1883864 - DNA, 15 bp, Homo sapiens
tatataaatgtatat

SEQ ID NO: 1883865 - DNA, 15 bp, Homo sapiens
atataaatgtatata

SEQ ID NO: 1883866 - DNA, 15 bp, Homo sapiens
tataaatgtatatat

SEQ ID NO: 1883867 - DNA, 15 bp, Homo sapiens
ataaatgtatatatt

SEQ ID NO: 1883868 - DNA, 15 bp, Homo sapiens
taaatgtatatattc

SEQ ID NO: 1883869 - DNA, 15 bp, Homo sapiens
aaatgtatatattct

SEQ ID NO: 1883870 - DNA, 15 bp, Homo sapiens
aatgtatatattcta

SEQ ID NO: 1883871 - DNA, 15 bp, Homo sapiens
atgtatatattctaa

SEQ ID NO: 1883872 - DNA, 15 bp, Homo sapiens
tgtatatattctaaa

SEQ ID NO: 1883873 - DNA, 15 bp, Homo sapiens
gtatatattctaaat

SEQ ID NO: 1883874 - DNA, 15 bp, Homo sapiens
tatatattctaaatt

SEQ ID NO: 1883875 - DNA, 15 bp, Homo sapiens
atatattctaaattc

SEQ ID NO: 1883876 - DNA, 15 bp, Homo sapiens
tatattctaaattct

SEQ ID NO: 1883877 - DNA, 15 bp, Homo sapiens
atattctaaattctg

SEQ ID NO: 1883878 - DNA, 15 bp, Homo sapiens
tattctaaattctga

SEQ ID NO: 1883879 - DNA, 15 bp, Homo sapiens
attctaaattctgaa

SEQ ID NO: 1883880 - DNA, 15 bp, Homo sapiens
ttctaaattctgaat

SEQ ID NO: 1883881 - DNA, 15 bp, Homo sapiens
tctaaattctgaatt

SEQ ID NO: 1883882 - DNA, 15 bp, Homo sapiens
ctaaattctgaatta

SEQ ID NO: 1883883 - DNA, 15 bp, Homo sapiens
taaattctgaattaa

SEQ ID NO: 1883884 - DNA, 15 bp, Homo sapiens
aaattctgaattaaa

SEQ ID NO: 1883885 - DNA, 15 bp, Homo sapiens
aattctgaattaaat

SEQ ID NO: 1883886 - DNA, 15 bp, Homo sapiens
attctgaattaaatt

SEQ ID NO: 1883887 - DNA, 15 bp, Homo sapiens
ttctgaattaaattt

SEQ ID NO: 1883888 - DNA, 15 bp, Homo sapiens
tctgaattaaatttt

SEQ ID NO: 1883889 - DNA, 15 bp, Homo sapiens
ctgaattaaatttta

SEQ ID NO: 1883890 - DNA, 15 bp, Homo sapiens
tgaattaaattttat

SEQ ID NO: 1883891 - DNA, 15 bp, Homo sapiens
gaattaaattttatt

SEQ ID NO: 1883892 - DNA, 15 bp, Homo sapiens
aattaaattttatta

SEQ ID NO: 1883893 - DNA, 15 bp, Homo sapiens
attaaattttattac

SEQ ID NO: 1883894 - DNA, 15 bp, Homo sapiens
ttaaattttattaca

SEQ ID NO: 1883895 - DNA, 15 bp, Homo sapiens
taaattttattacat

SEQ ID NO: 1883896 - DNA, 15 bp, Homo sapiens
aaattttattacatg

SEQ ID NO: 1883897 - DNA, 15 bp, Homo sapiens
aattttattacatgg

SEQ ID NO: 1883898 - DNA, 15 bp, Homo sapiens
attttattacatggc

SEQ ID NO: 1883899 - DNA, 15 bp, Homo sapiens
ttttattacatggcc

SEQ ID NO: 1883900 - DNA, 15 bp, Homo sapiens
tttattacatggcca

SEQ ID NO: 1883901 - DNA, 15 bp, Homo sapiens
ttattacatggccag

SEQ ID NO: 1883902 - DNA, 15 bp, Homo sapiens
tattacatggccaga

SEQ ID NO: 1883903 - DNA, 15 bp, Homo sapiens
attacatggccagaa

SEQ ID NO: 1883904 - DNA, 15 bp, Homo sapiens
ttacatggccagaag

SEQ ID NO: 1883905 - DNA, 15 bp, Homo sapiens
tacatggccagaagc

SEQ ID NO: 1883906 - DNA, 15 bp, Homo sapiens
acatggccagaagca

SEQ ID NO: 1883907 - DNA, 15 bp, Homo sapiens
catggccagaagcaa

SEQ ID NO: 1883908 - DNA, 15 bp, Homo sapiens
atggccagaagcaat

SEQ ID NO: 1883909 - DNA, 15 bp, Homo sapiens
tggccagaagcaatt

SEQ ID NO: 1883910 - DNA, 15 bp, Homo sapiens
ggccagaagcaattt

SEQ ID NO: 1883911 - DNA, 15 bp, Homo sapiens
gccagaagcaattta

SEQ ID NO: 1883912 - DNA, 15 bp, Homo sapiens
ccagaagcaatttaa

SEQ ID NO: 1883913 - DNA, 15 bp, Homo sapiens
cagaagcaatttaag

SEQ ID NO: 1883914 - DNA, 15 bp, Homo sapiens
agaagcaatttaagt

SEQ ID NO: 1883915 - DNA, 15 bp, Homo sapiens
gaagcaatttaagtg

SEQ ID NO: 1883916 - DNA, 15 bp, Homo sapiens
aagcaatttaagtgc

SEQ ID NO: 1883917 - DNA, 15 bp, Homo sapiens
agcaatttaagtgct

SEQ ID NO: 1883918 - DNA, 15 bp, Homo sapiens
gcaatttaagtgctg

SEQ ID NO: 1883919 - DNA, 15 bp, Homo sapiens
caatttaagtgctga

SEQ ID NO: 1883920 - DNA, 15 bp, Homo sapiens
aatttaagtgctgat

SEQ ID NO: 1883921 - DNA, 15 bp, Homo sapiens
atttaagtgctgatt

SEQ ID NO: 1883922 - DNA, 15 bp, Homo sapiens
tttaagtgctgatta

SEQ ID NO: 1883923 - DNA, 15 bp, Homo sapiens
ttaagtgctgattaa

SEQ ID NO: 1883924 - DNA, 15 bp, Homo sapiens
taagtgctgattaaa

SEQ ID NO: 1883925 - DNA, 15 bp, Homo sapiens
aagtgctgattaaat

SEQ ID NO: 1883926 - DNA, 15 bp, Homo sapiens
agtgctgattaaatt

SEQ ID NO: 1883927 - DNA, 15 bp, Homo sapiens
gtgctgattaaattc

SEQ ID NO: 1883928 - DNA, 15 bp, Homo sapiens
tgctgattaaattca

SEQ ID NO: 1883929 - DNA, 15 bp, Homo sapiens
gctgattaaattcag

SEQ ID NO: 1883930 - DNA, 15 bp, Homo sapiens
ctgattaaattcaga

SEQ ID NO: 1883931 - DNA, 15 bp, Homo sapiens
tgattaaattcagat

SEQ ID NO: 1883932 - DNA, 15 bp, Homo sapiens
gattaaattcagatc

SEQ ID NO: 1883933 - DNA, 15 bp, Homo sapiens
attaaattcagatca

SEQ ID NO: 1883934 - DNA, 15 bp, Homo sapiens
ttaaattcagatcat

SEQ ID NO: 1883935 - DNA, 15 bp, Homo sapiens
taaattcagatcata

SEQ ID NO: 1883936 - DNA, 15 bp, Homo sapiens
aaattcagatcataa

SEQ ID NO: 1883937 - DNA, 15 bp, Homo sapiens
aattcagatcataaa

SEQ ID NO: 1883938 - DNA, 15 bp, Homo sapiens
attcagatcataaag

SEQ ID NO: 1883939 - DNA, 15 bp, Homo sapiens
tcagatcataaagaa

SEQ ID NO: 1883940 - DNA, 15 bp, Homo sapiens
cagatcataaagaaa

SEQ ID NO: 1883941 - DNA, 15 bp, Homo sapiens
agatcataaagaaaa

SEQ ID NO: 1883942 - DNA, 15 bp, Homo sapiens
gatcataaagaaaaa

SEQ ID NO: 1883943 - DNA, 15 bp, Homo sapiens
atcataaagaaaaac

SEQ ID NO: 1883944 - DNA, 15 bp, Homo sapiens
tcataaagaaaaaca

SEQ ID NO: 1883945 - DNA, 15 bp, Homo sapiens
cataaagaaaaacaa

SEQ ID NO: 1883946 - DNA, 15 bp, Homo sapiens
ataaagaaaaacaat

SEQ ID NO: 1883947 - DNA, 15 bp, Homo sapiens
taaagaaaaacaatg

SEQ ID NO: 1883948 - DNA, 15 bp, Homo sapiens
aaagaaaaacaatgg

SEQ ID NO: 1883949 - DNA, 15 bp, Homo sapiens
aagaaaaacaatggc

SEQ ID NO: 1883950 - DNA, 15 bp, Homo sapiens
agaaaaacaatggcg

SEQ ID NO: 1883951 - DNA, 15 bp, Homo sapiens
gaaaaacaatggcga

SEQ ID NO: 1883952 - DNA, 15 bp, Homo sapiens
aaaaacaatggcgat

SEQ ID NO: 1883953 - DNA, 15 bp, Homo sapiens
aaaacaatggcgatg

SEQ ID NO: 1883954 - DNA, 15 bp, Homo sapiens
aaacaatggcgatgt

SEQ ID NO: 1883955 - DNA, 15 bp, Homo sapiens
aacaatggcgatgta

SEQ ID NO: 1883956 - DNA, 15 bp, Homo sapiens
acaatggcgatgtag

SEQ ID NO: 1883957 - DNA, 15 bp, Homo sapiens
caatggcgatgtaga

SEQ ID NO: 1883958 - DNA, 15 bp, Homo sapiens
aatggcgatgtagaa

SEQ ID NO: 1883959 - DNA, 15 bp, Homo sapiens
atggcgatgtagaaa

SEQ ID NO: 1883960 - DNA, 15 bp, Homo sapiens
tggcgatgtagaaat

SEQ ID NO: 1883961 - DNA, 15 bp, Homo sapiens
ggcgatgtagaaatt

SEQ ID NO: 1883962 - DNA, 15 bp, Homo sapiens
gcgatgtagaaattt

SEQ ID NO: 1883963 - DNA, 15 bp, Homo sapiens
cgatgtagaaattta

SEQ ID NO: 1883964 - DNA, 15 bp, Homo sapiens
gatgtagaaatttag

SEQ ID NO: 1883965 - DNA, 15 bp, Homo sapiens
atgtagaaatttagg

SEQ ID NO: 1883966 - DNA, 15 bp, Homo sapiens
tgtagaaatttaggt

SEQ ID NO: 1883967 - DNA, 15 bp, Homo sapiens
gtagaaatttaggta

SEQ ID NO: 1883968 - DNA, 15 bp, Homo sapiens
tagaaatttaggtag

SEQ ID NO: 1883969 - DNA, 15 bp, Homo sapiens
agaaatttaggtaga

SEQ ID NO: 1883970 - DNA, 15 bp, Homo sapiens
gaaatttaggtagag

SEQ ID NO: 1883971 - DNA, 15 bp, Homo sapiens
aaatttaggtagagt

SEQ ID NO: 1883972 - DNA, 15 bp, Homo sapiens
aatttaggtagagta

SEQ ID NO: 1883973 - DNA, 15 bp, Homo sapiens
atttaggtagagtaa

SEQ ID NO: 1883974 - DNA, 15 bp, Homo sapiens
tttaggtagagtaaa

SEQ ID NO: 1883975 - DNA, 15 bp, Homo sapiens
ttaggtagagtaaaa

SEQ ID NO: 1883976 - DNA, 15 bp, Homo sapiens
taggtagagtaaaaa

SEQ ID NO: 1883977 - DNA, 15 bp, Homo sapiens
aggtagagtaaaaaa

SEQ ID NO: 1883978 - DNA, 15 bp, Homo sapiens
ggtagagtaaaaaaa

SEQ ID NO: 1883979 - DNA, 15 bp, Homo sapiens
gtagagtaaaaaaaa

SEQ ID NO: 1883980 - DNA, 15 bp, Homo sapiens
tagagtaaaaaaaat

SEQ ID NO: 1883981 - DNA, 15 bp, Homo sapiens
agagtaaaaaaaata

SEQ ID NO: 1883982 - DNA, 15 bp, Homo sapiens
gagtaaaaaaaatat

SEQ ID NO: 1883983 - DNA, 15 bp, Homo sapiens
agtaaaaaaaatata

SEQ ID NO: 1883984 - DNA, 15 bp, Homo sapiens
gtaaaaaaaatatat

SEQ ID NO: 1883985 - DNA, 15 bp, Homo sapiens
taaaaaaaatatatt

SEQ ID NO: 1883986 - DNA, 15 bp, Homo sapiens
aaaaaaaatatattc

SEQ ID NO: 1883987 - DNA, 15 bp, Homo sapiens
aaaaaaatatattca

SEQ ID NO: 1883988 - DNA, 15 bp, Homo sapiens
aaaaaatatattcaa

SEQ ID NO: 1883989 - DNA, 15 bp, Homo sapiens
aaaaatatattcaag

SEQ ID NO: 1883990 - DNA, 15 bp, Homo sapiens
aaaatatattcaaga

SEQ ID NO: 1883991 - DNA, 15 bp, Homo sapiens
aaatatattcaagac

SEQ ID NO: 1883992 - DNA, 15 bp, Homo sapiens
aatatattcaagacc

SEQ ID NO: 1883993 - DNA, 15 bp, Homo sapiens
atatattcaagacct

SEQ ID NO: 1883994 - DNA, 15 bp, Homo sapiens
tatattcaagacctt

SEQ ID NO: 1883995 - DNA, 15 bp, Homo sapiens
atattcaagaccttc

SEQ ID NO: 1883996 - DNA, 15 bp, Homo sapiens
tattcaagaccttcg

SEQ ID NO: 1883997 - DNA, 15 bp, Homo sapiens
attcaagaccttcgt

SEQ ID NO: 1883998 - DNA, 15 bp, Homo sapiens
ttcaagaccttcgtc

SEQ ID NO: 1883999 - DNA, 15 bp, Homo sapiens
tcaagaccttcgtcg

SEQ ID NO: 1884000 - DNA, 15 bp, Homo sapiens
caagaccttcgtcgg

SEQ ID NO: 1884001 - DNA, 15 bp, Homo sapiens
aagaccttcgtcggt

SEQ ID NO: 1884002 - DNA, 15 bp, Homo sapiens
agaccttcgtcggtc

SEQ ID NO: 1884003 - DNA, 15 bp, Homo sapiens
gaccttcgtcggtcc

SEQ ID NO: 1884004 - DNA, 15 bp, Homo sapiens
accttcgtcggtccc

SEQ ID NO: 1884005 - DNA, 15 bp, Homo sapiens
ccttcgtcggtccca

SEQ ID NO: 1884006 - DNA, 15 bp, Homo sapiens
cttcgtcggtcccaa

SEQ ID NO: 1884007 - DNA, 15 bp, Homo sapiens
ttcgtcggtcccaaa

SEQ ID NO: 1884008 - DNA, 15 bp, Homo sapiens
tcgtcggtcccaaat

SEQ ID NO: 1884009 - DNA, 15 bp, Homo sapiens
cgtcggtcccaaatt

SEQ ID NO: 1884010 - DNA, 15 bp, Homo sapiens
gtcggtcccaaattt

SEQ ID NO: 1884011 - DNA, 15 bp, Homo sapiens
tcggtcccaaatttt

SEQ ID NO: 1884012 - DNA, 15 bp, Homo sapiens
cggtcccaaattttc

SEQ ID NO: 1884013 - DNA, 15 bp, Homo sapiens
ggtcccaaattttca

SEQ ID NO: 1884014 - DNA, 15 bp, Homo sapiens
gtcccaaattttcat

SEQ ID NO: 1884015 - DNA, 15 bp, Homo sapiens
tcccaaattttcata

SEQ ID NO: 1884016 - DNA, 15 bp, Homo sapiens
cccaaattttcatag

SEQ ID NO: 1884017 - DNA, 15 bp, Homo sapiens
ccaaattttcatagc

SEQ ID NO: 1884018 - DNA, 15 bp, Homo sapiens
caaattttcatagca

SEQ ID NO: 1884019 - DNA, 15 bp, Homo sapiens
attttcatagcacta

SEQ ID NO: 1884020 - DNA, 15 bp, Homo sapiens
ttttcatagcactag

SEQ ID NO: 1884021 - DNA, 15 bp, Homo sapiens
tttcatagcactaga

SEQ ID NO: 1884022 - DNA, 15 bp, Homo sapiens
ttcatagcactagaa

SEQ ID NO: 1884023 - DNA, 15 bp, Homo sapiens
tcatagcactagaac

SEQ ID NO: 1884024 - DNA, 15 bp, Homo sapiens
catagcactagaaca

SEQ ID NO: 1884025 - DNA, 15 bp, Homo sapiens
atagcactagaacaa

SEQ ID NO: 1884026 - DNA, 15 bp, Homo sapiens
tagcactagaacaaa

SEQ ID NO: 1884027 - DNA, 15 bp, Homo sapiens
agcactagaacaaat

SEQ ID NO: 1884028 - DNA, 15 bp, Homo sapiens
gcactagaacaaata

SEQ ID NO: 1884029 - DNA, 15 bp, Homo sapiens
cactagaacaaataa

SEQ ID NO: 1884030 - DNA, 15 bp, Homo sapiens
actagaacaaataat

SEQ ID NO: 1884031 - DNA, 15 bp, Homo sapiens
ctagaacaaataatt

SEQ ID NO: 1884032 - DNA, 15 bp, Homo sapiens
tagaacaaataattt

SEQ ID NO: 1884033 - DNA, 15 bp, Homo sapiens
agaacaaataatttt

SEQ ID NO: 1884034 - DNA, 15 bp, Homo sapiens
gaacaaataatttta

SEQ ID NO: 1884035 - DNA, 15 bp, Homo sapiens
aacaaataattttat

SEQ ID NO: 1884036 - DNA, 15 bp, Homo sapiens
acaaataattttatc

SEQ ID NO: 1884037 - DNA, 15 bp, Homo sapiens
caaataattttatcg

SEQ ID NO: 1884038 - DNA, 15 bp, Homo sapiens
aaataattttatcga

SEQ ID NO: 1884039 - DNA, 15 bp, Homo sapiens
aataattttatcgat

SEQ ID NO: 1884040 - DNA, 15 bp, Homo sapiens
ataattttatcgata

SEQ ID NO: 1884041 - DNA, 15 bp, Homo sapiens
taattttatcgataa

SEQ ID NO: 1884042 - DNA, 15 bp, Homo sapiens
aattttatcgataag

SEQ ID NO: 1884043 - DNA, 15 bp, Homo sapiens
attttatcgataaga

SEQ ID NO: 1884044 - DNA, 15 bp, Homo sapiens
ttttatcgataagaa

SEQ ID NO: 1884045 - DNA, 15 bp, Homo sapiens
tttatcgataagaag

SEQ ID NO: 1884046 - DNA, 15 bp, Homo sapiens
ttatcgataagaagc

SEQ ID NO: 1884047 - DNA, 15 bp, Homo sapiens
tatcgataagaagcc

SEQ ID NO: 1884048 - DNA, 15 bp, Homo sapiens
atcgataagaagcca

SEQ ID NO: 1884049 - DNA, 15 bp, Homo sapiens
tcgataagaagccat

SEQ ID NO: 1884050 - DNA, 15 bp, Homo sapiens
cgataagaagccatt

SEQ ID NO: 1884051 - DNA, 15 bp, Homo sapiens
gataagaagccattt

SEQ ID NO: 1884052 - DNA, 15 bp, Homo sapiens
ataagaagccatttg

SEQ ID NO: 1884053 - DNA, 15 bp, Homo sapiens
taagaagccatttgg

SEQ ID NO: 1884054 - DNA, 15 bp, Homo sapiens
aagaagccatttggt

SEQ ID NO: 1884055 - DNA, 15 bp, Homo sapiens
agaagccatttggtt

SEQ ID NO: 1884056 - DNA, 15 bp, Homo sapiens
gaagccatttggttc

SEQ ID NO: 1884057 - DNA, 15 bp, Homo sapiens
aagccatttggttcc

SEQ ID NO: 1884058 - DNA, 15 bp, Homo sapiens
agccatttggttcca

SEQ ID NO: 1884059 - DNA, 15 bp, Homo sapiens
gccatttggttccaa

SEQ ID NO: 1884060 - DNA, 15 bp, Homo sapiens
ccatttggttccaat

SEQ ID NO: 1884061 - DNA, 15 bp, Homo sapiens
catttggttccaata

SEQ ID NO: 1884062 - DNA, 15 bp, Homo sapiens
atttggttccaataa

SEQ ID NO: 1884063 - DNA, 15 bp, Homo sapiens
tttggttccaataat

SEQ ID NO: 1884064 - DNA, 15 bp, Homo sapiens
ttggttccaataata

SEQ ID NO: 1884065 - DNA, 15 bp, Homo sapiens
tggttccaataataa

SEQ ID NO: 1884066 - DNA, 15 bp, Homo sapiens
ggttccaataataat

SEQ ID NO: 1884067 - DNA, 15 bp, Homo sapiens
gttccaataataata

SEQ ID NO: 1884068 - DNA, 15 bp, Homo sapiens
ttccaataataataa

SEQ ID NO: 1884069 - DNA, 15 bp, Homo sapiens
tccaataataataac

SEQ ID NO: 1884070 - DNA, 15 bp, Homo sapiens
ccaataataataact

SEQ ID NO: 1884071 - DNA, 15 bp, Homo sapiens
caataataataacta

SEQ ID NO: 1884072 - DNA, 15 bp, Homo sapiens
aataataataactaa

SEQ ID NO: 1884073 - DNA, 15 bp, Homo sapiens
ataataataactaac

SEQ ID NO: 1884074 - DNA, 15 bp, Homo sapiens
taataataactaaca

SEQ ID NO: 1884075 - DNA, 15 bp, Homo sapiens
aataataactaacac

SEQ ID NO: 1884076 - DNA, 15 bp, Homo sapiens
ataataactaacact

SEQ ID NO: 1884077 - DNA, 15 bp, Homo sapiens
taataactaacactc

SEQ ID NO: 1884078 - DNA, 15 bp, Homo sapiens
aataactaacactct

SEQ ID NO: 1884079 - DNA, 15 bp, Homo sapiens
ataactaacactctt

SEQ ID NO: 1884080 - DNA, 15 bp, Homo sapiens
taactaacactctta

SEQ ID NO: 1884081 - DNA, 15 bp, Homo sapiens
aactaacactcttag

SEQ ID NO: 1884082 - DNA, 15 bp, Homo sapiens
actaacactcttagt

SEQ ID NO: 1884083 - DNA, 15 bp, Homo sapiens
ctaacactcttagtg

SEQ ID NO: 1884084 - DNA, 15 bp, Homo sapiens
taacactcttagtgt

SEQ ID NO: 1884085 - DNA, 15 bp, Homo sapiens
aacactcttagtgtc

SEQ ID NO: 1884086 - DNA, 15 bp, Homo sapiens
acactcttagtgtct

SEQ ID NO: 1884087 - DNA, 15 bp, Homo sapiens
cactcttagtgtctg

SEQ ID NO: 1884088 - DNA, 15 bp, Homo sapiens
actcttagtgtctgc

SEQ ID NO: 1884089 - DNA, 15 bp, Homo sapiens
ctcttagtgtctgct

SEQ ID NO: 1884090 - DNA, 15 bp, Homo sapiens
tcttagtgtctgcta

SEQ ID NO: 1884091 - DNA, 15 bp, Homo sapiens
cttagtgtctgctat

SEQ ID NO: 1884092 - DNA, 15 bp, Homo sapiens
ttagtgtctgctatc

SEQ ID NO: 1884093 - DNA, 15 bp, Homo sapiens
tagtgtctgctatca

SEQ ID NO: 1884094 - DNA, 15 bp, Homo sapiens
agtgtctgctatcag

SEQ ID NO: 1884095 - DNA, 15 bp, Homo sapiens
gtgtctgctatcagc

SEQ ID NO: 1884096 - DNA, 15 bp, Homo sapiens
tgtctgctatcagct

SEQ ID NO: 1884097 - DNA, 15 bp, Homo sapiens
gtctgctatcagctt

SEQ ID NO: 1884098 - DNA, 15 bp, Homo sapiens
tctgctatcagcttt

SEQ ID NO: 1884099 - DNA, 15 bp, Homo sapiens
ctgctatcagcttta

SEQ ID NO: 1884100 - DNA, 15 bp, Homo sapiens
tgctatcagctttat

SEQ ID NO: 1884101 - DNA, 15 bp, Homo sapiens
gctatcagctttata

SEQ ID NO: 1884102 - DNA, 15 bp, Homo sapiens
ctatcagctttatat

SEQ ID NO: 1884103 - DNA, 15 bp, Homo sapiens
tatcagctttatatg

SEQ ID NO: 1884104 - DNA, 15 bp, Homo sapiens
atcagctttatatga

SEQ ID NO: 1884105 - DNA, 15 bp, Homo sapiens
tcagctttatatgat

SEQ ID NO: 1884106 - DNA, 15 bp, Homo sapiens
cagctttatatgata

SEQ ID NO: 1884107 - DNA, 15 bp, Homo sapiens
agctttatatgatat

SEQ ID NO: 1884108 - DNA, 15 bp, Homo sapiens
gctttatatgatatt

SEQ ID NO: 1884109 - DNA, 15 bp, Homo sapiens
ctttatatgatattg

SEQ ID NO: 1884110 - DNA, 15 bp, Homo sapiens
tttatatgatattgt

SEQ ID NO: 1884111 - DNA, 15 bp, Homo sapiens
ttatatgatattgtc

SEQ ID NO: 1884112 - DNA, 15 bp, Homo sapiens
tatatgatattgtct

SEQ ID NO: 1884113 - DNA, 15 bp, Homo sapiens
atatgatattgtctc

SEQ ID NO: 1884114 - DNA, 15 bp, Homo sapiens
tatgatattgtctct

SEQ ID NO: 1884115 - DNA, 15 bp, Homo sapiens
atgatattgtctctt

SEQ ID NO: 1884116 - DNA, 15 bp, Homo sapiens
tgatattgtctcttg

SEQ ID NO: 1884117 - DNA, 15 bp, Homo sapiens
gatattgtctcttgt

SEQ ID NO: 1884118 - DNA, 15 bp, Homo sapiens
atattgtctcttgta

SEQ ID NO: 1884119 - DNA, 15 bp, Homo sapiens
tattgtctcttgtaa

SEQ ID NO: 1884120 - DNA, 15 bp, Homo sapiens
attgtctcttgtaat

SEQ ID NO: 1884121 - DNA, 15 bp, Homo sapiens
ttgtctcttgtaatc

SEQ ID NO: 1884122 - DNA, 15 bp, Homo sapiens
tgtctcttgtaatcc

SEQ ID NO: 1884123 - DNA, 15 bp, Homo sapiens
gtctcttgtaatcct

SEQ ID NO: 1884124 - DNA, 15 bp, Homo sapiens
tctcttgtaatcctc

SEQ ID NO: 1884125 - DNA, 15 bp, Homo sapiens
ctcttgtaatcctca

SEQ ID NO: 1884126 - DNA, 15 bp, Homo sapiens
tcttgtaatcctcac

SEQ ID NO: 1884127 - DNA, 15 bp, Homo sapiens
cttgtaatcctcaca

SEQ ID NO: 1884128 - DNA, 15 bp, Homo sapiens
ttgtaatcctcacaa

SEQ ID NO: 1884129 - DNA, 15 bp, Homo sapiens
tgtaatcctcacaat

SEQ ID NO: 1884130 - DNA, 15 bp, Homo sapiens
gtaatcctcacaata

SEQ ID NO: 1884131 - DNA, 15 bp, Homo sapiens
taatcctcacaatag

SEQ ID NO: 1884132 - DNA, 15 bp, Homo sapiens
aatcctcacaatagc

SEQ ID NO: 1884133 - DNA, 15 bp, Homo sapiens
atcctcacaatagcc

SEQ ID NO: 1884134 - DNA, 15 bp, Homo sapiens
tcctcacaatagccc

SEQ ID NO: 1884135 - DNA, 15 bp, Homo sapiens
cctcacaatagcccc

SEQ ID NO: 1884136 - DNA, 15 bp, Homo sapiens
ctcacaatagcccca

SEQ ID NO: 1884137 - DNA, 15 bp, Homo sapiens
tcacaatagccccag

SEQ ID NO: 1884138 - DNA, 15 bp, Homo sapiens
cacaatagccccagg

SEQ ID NO: 1884139 - DNA, 15 bp, Homo sapiens
acaatagccccagga

SEQ ID NO: 1884140 - DNA, 15 bp, Homo sapiens
caatagccccaggaa

SEQ ID NO: 1884141 - DNA, 15 bp, Homo sapiens
aatagccccaggaag

SEQ ID NO: 1884142 - DNA, 15 bp, Homo sapiens
atagccccaggaagc

SEQ ID NO: 1884143 - DNA, 15 bp, Homo sapiens
tagccccaggaagca

SEQ ID NO: 1884144 - DNA, 15 bp, Homo sapiens
agccccaggaagcag

SEQ ID NO: 1884145 - DNA, 15 bp, Homo sapiens
gccccaggaagcaga

SEQ ID NO: 1884146 - DNA, 15 bp, Homo sapiens
ccccaggaagcagat

SEQ ID NO: 1884147 - DNA, 15 bp, Homo sapiens
cccaggaagcagata

SEQ ID NO: 1884148 - DNA, 15 bp, Homo sapiens
ccaggaagcagatat

SEQ ID NO: 1884149 - DNA, 15 bp, Homo sapiens
caggaagcagatatt

SEQ ID NO: 1884150 - DNA, 15 bp, Homo sapiens
aggaagcagatatta

SEQ ID NO: 1884151 - DNA, 15 bp, Homo sapiens
ggaagcagatattat

SEQ ID NO: 1884152 - DNA, 15 bp, Homo sapiens
gaagcagatattatt

SEQ ID NO: 1884153 - DNA, 15 bp, Homo sapiens
aagcagatattatta

SEQ ID NO: 1884154 - DNA, 15 bp, Homo sapiens
agcagatattattat

SEQ ID NO: 1884155 - DNA, 15 bp, Homo sapiens
gcagatattattatt

SEQ ID NO: 1884156 - DNA, 15 bp, Homo sapiens
cagatattattatta

SEQ ID NO: 1884157 - DNA, 15 bp, Homo sapiens
agatattattattat

SEQ ID NO: 1884158 - DNA, 15 bp, Homo sapiens
gatattattattatc

SEQ ID NO: 1884159 - DNA, 15 bp, Homo sapiens
atattattattatct

SEQ ID NO: 1884160 - DNA, 15 bp, Homo sapiens
tattattattatctc

SEQ ID NO: 1884161 - DNA, 15 bp, Homo sapiens
attattattatctct

SEQ ID NO: 1884162 - DNA, 15 bp, Homo sapiens
ttattattatctctc

SEQ ID NO: 1884163 - DNA, 15 bp, Homo sapiens
tattattatctctct

SEQ ID NO: 1884164 - DNA, 15 bp, Homo sapiens
attattatctctctt

SEQ ID NO: 1884165 - DNA, 15 bp, Homo sapiens
ttattatctctcttt

SEQ ID NO: 1884166 - DNA, 15 bp, Homo sapiens
tattatctctctttt

SEQ ID NO: 1884167 - DNA, 15 bp, Homo sapiens
attatctctctttta

SEQ ID NO: 1884168 - DNA, 15 bp, Homo sapiens
ttatctctcttttat

SEQ ID NO: 1884169 - DNA, 15 bp, Homo sapiens
tatctctcttttata

SEQ ID NO: 1884170 - DNA, 15 bp, Homo sapiens
atctctcttttatag

SEQ ID NO: 1884171 - DNA, 15 bp, Homo sapiens
tctctcttttatagt

SEQ ID NO: 1884172 - DNA, 15 bp, Homo sapiens
ctctcttttatagtt

SEQ ID NO: 1884173 - DNA, 15 bp, Homo sapiens
tctcttttatagtta

SEQ ID NO: 1884174 - DNA, 15 bp, Homo sapiens
ctcttttatagttaa

SEQ ID NO: 1884175 - DNA, 15 bp, Homo sapiens
tcttttatagttaag

SEQ ID NO: 1884176 - DNA, 15 bp, Homo sapiens
cttttatagttaagg

SEQ ID NO: 1884177 - DNA, 15 bp, Homo sapiens
ttttatagttaaggg

SEQ ID NO: 1884178 - DNA, 15 bp, Homo sapiens
tttatagttaaggga

SEQ ID NO: 1884179 - DNA, 15 bp, Homo sapiens
ttatagttaagggag

SEQ ID NO: 1884180 - DNA, 15 bp, Homo sapiens
tatagttaagggagc

SEQ ID NO: 1884181 - DNA, 15 bp, Homo sapiens
atagttaagggagct

SEQ ID NO: 1884182 - DNA, 15 bp, Homo sapiens
tagttaagggagctg

SEQ ID NO: 1884183 - DNA, 15 bp, Homo sapiens
agttaagggagctga

SEQ ID NO: 1884184 - DNA, 15 bp, Homo sapiens
gttaagggagctgag

SEQ ID NO: 1884185 - DNA, 15 bp, Homo sapiens
ttaagggagctgagg

SEQ ID NO: 1884186 - DNA, 15 bp, Homo sapiens
taagggagctgaggt

SEQ ID NO: 1884187 - DNA, 15 bp, Homo sapiens
aagggagctgaggta

SEQ ID NO: 1884188 - DNA, 15 bp, Homo sapiens
agggagctgaggtat

SEQ ID NO: 1884189 - DNA, 15 bp, Homo sapiens
gggagctgaggtata

SEQ ID NO: 1884190 - DNA, 15 bp, Homo sapiens
ggagctgaggtatag

SEQ ID NO: 1884191 - DNA, 15 bp, Homo sapiens
gagctgaggtatagc

SEQ ID NO: 1884192 - DNA, 15 bp, Homo sapiens
agctgaggtatagca

SEQ ID NO: 1884193 - DNA, 15 bp, Homo sapiens
gctgaggtatagcaa

SEQ ID NO: 1884194 - DNA, 15 bp, Homo sapiens
ctgaggtatagcaag

SEQ ID NO: 1884195 - DNA, 15 bp, Homo sapiens
tgaggtatagcaagg

SEQ ID NO: 1884196 - DNA, 15 bp, Homo sapiens
gaggtatagcaaggt

SEQ ID NO: 1884197 - DNA, 15 bp, Homo sapiens
aggtatagcaaggtg

SEQ ID NO: 1884198 - DNA, 15 bp, Homo sapiens
ggtatagcaaggtga

SEQ ID NO: 1884199 - DNA, 15 bp, Homo sapiens
gtatagcaaggtgaa

SEQ ID NO: 1884200 - DNA, 15 bp, Homo sapiens
tatagcaaggtgaag

SEQ ID NO: 1884201 - DNA, 15 bp, Homo sapiens
atagcaaggtgaagt

SEQ ID NO: 1884202 - DNA, 15 bp, Homo sapiens
tagcaaggtgaagta

SEQ ID NO: 1884203 - DNA, 15 bp, Homo sapiens
agcaaggtgaagtaa

SEQ ID NO: 1884204 - DNA, 15 bp, Homo sapiens
gcaaggtgaagtaat

SEQ ID NO: 1884205 - DNA, 15 bp, Homo sapiens
caaggtgaagtaatc

SEQ ID NO: 1884206 - DNA, 15 bp, Homo sapiens
aaggtgaagtaatct

SEQ ID NO: 1884207 - DNA, 15 bp, Homo sapiens
aggtgaagtaatctg

SEQ ID NO: 1884208 - DNA, 15 bp, Homo sapiens
ggtgaagtaatctgt

SEQ ID NO: 1884209 - DNA, 15 bp, Homo sapiens
gtgaagtaatctgtc

SEQ ID NO: 1884210 - DNA, 15 bp, Homo sapiens
tgaagtaatctgtcc

SEQ ID NO: 1884211 - DNA, 15 bp, Homo sapiens
gaagtaatctgtcca

SEQ ID NO: 1884212 - DNA, 15 bp, Homo sapiens
aagtaatctgtccag

SEQ ID NO: 1884213 - DNA, 15 bp, Homo sapiens
agtaatctgtccagg

SEQ ID NO: 1884214 - DNA, 15 bp, Homo sapiens
gtaatctgtccaggg

SEQ ID NO: 1884215 - DNA, 15 bp, Homo sapiens
taatctgtccagggt

SEQ ID NO: 1884216 - DNA, 15 bp, Homo sapiens
aatctgtccagggtc

SEQ ID NO: 1884217 - DNA, 15 bp, Homo sapiens
atctgtccagggtca

SEQ ID NO: 1884218 - DNA, 15 bp, Homo sapiens
tctgtccagggtcac

SEQ ID NO: 1884219 - DNA, 15 bp, Homo sapiens
ctgtccagggtcaca

SEQ ID NO: 1884220 - DNA, 15 bp, Homo sapiens
tgtccagggtcacat

SEQ ID NO: 1884221 - DNA, 15 bp, Homo sapiens
gtccagggtcacatg

SEQ ID NO: 1884222 - DNA, 15 bp, Homo sapiens
tccagggtcacatgg

SEQ ID NO: 1884223 - DNA, 15 bp, Homo sapiens
ccagggtcacatggc

SEQ ID NO: 1884224 - DNA, 15 bp, Homo sapiens
cagggtcacatggcg

SEQ ID NO: 1884225 - DNA, 15 bp, Homo sapiens
agggtcacatggcgg

SEQ ID NO: 1884226 - DNA, 15 bp, Homo sapiens
gggtcacatggcgga

SEQ ID NO: 1884227 - DNA, 15 bp, Homo sapiens
ggtcacatggcggat

SEQ ID NO: 1884228 - DNA, 15 bp, Homo sapiens
gtcacatggcggata

SEQ ID NO: 1884229 - DNA, 15 bp, Homo sapiens
tcacatggcggataa

SEQ ID NO: 1884230 - DNA, 15 bp, Homo sapiens
cacatggcggataac

SEQ ID NO: 1884231 - DNA, 15 bp, Homo sapiens
acatggcggataacc

SEQ ID NO: 1884232 - DNA, 15 bp, Homo sapiens
catggcggataacct

SEQ ID NO: 1884233 - DNA, 15 bp, Homo sapiens
atggcggataacctg

SEQ ID NO: 1884234 - DNA, 15 bp, Homo sapiens
tggcggataacctgg

SEQ ID NO: 1884235 - DNA, 15 bp, Homo sapiens
ggcggataacctggg

SEQ ID NO: 1884236 - DNA, 15 bp, Homo sapiens
gcggataacctgggt

SEQ ID NO: 1884237 - DNA, 15 bp, Homo sapiens
cggataacctgggta

SEQ ID NO: 1884238 - DNA, 15 bp, Homo sapiens
ggataacctgggtag

SEQ ID NO: 1884239 - DNA, 15 bp, Homo sapiens
gataacctgggtagt

SEQ ID NO: 1884240 - DNA, 15 bp, Homo sapiens
ataacctgggtagtc

SEQ ID NO: 1884241 - DNA, 15 bp, Homo sapiens
taacctgggtagtct

SEQ ID NO: 1884242 - DNA, 15 bp, Homo sapiens
aacctgggtagtctt

SEQ ID NO: 1884243 - DNA, 15 bp, Homo sapiens
acctgggtagtctta

SEQ ID NO: 1884244 - DNA, 15 bp, Homo sapiens
cctgggtagtcttac

SEQ ID NO: 1884245 - DNA, 15 bp, Homo sapiens
ctgggtagtcttact

SEQ ID NO: 1884246 - DNA, 15 bp, Homo sapiens
tgggtagtcttactt

SEQ ID NO: 1884247 - DNA, 15 bp, Homo sapiens
gggtagtcttacttc

SEQ ID NO: 1884248 - DNA, 15 bp, Homo sapiens
ggtagtcttacttca

SEQ ID NO: 1884249 - DNA, 15 bp, Homo sapiens
gtagtcttacttcac

SEQ ID NO: 1884250 - DNA, 15 bp, Homo sapiens
tagtcttacttcaca

SEQ ID NO: 1884251 - DNA, 15 bp, Homo sapiens
agtcttacttcacaa

SEQ ID NO: 1884252 - DNA, 15 bp, Homo sapiens
gtcttacttcacaat

SEQ ID NO: 1884253 - DNA, 15 bp, Homo sapiens
tcttacttcacaatc

SEQ ID NO: 1884254 - DNA, 15 bp, Homo sapiens
cttacttcacaatcc

SEQ ID NO: 1884255 - DNA, 15 bp, Homo sapiens
ttacttcacaatcca

SEQ ID NO: 1884256 - DNA, 15 bp, Homo sapiens
tacttcacaatccaa

SEQ ID NO: 1884257 - DNA, 15 bp, Homo sapiens
acttcacaatccaag

SEQ ID NO: 1884258 - DNA, 15 bp, Homo sapiens
cttcacaatccaagt

SEQ ID NO: 1884259 - DNA, 15 bp, Homo sapiens
ttcacaatccaagtt

SEQ ID NO: 1884260 - DNA, 15 bp, Homo sapiens
tcacaatccaagttc

SEQ ID NO: 1884261 - DNA, 15 bp, Homo sapiens
cacaatccaagttct

SEQ ID NO: 1884262 - DNA, 15 bp, Homo sapiens
acaatccaagttctt

SEQ ID NO: 1884263 - DNA, 15 bp, Homo sapiens
caatccaagttctta

SEQ ID NO: 1884264 - DNA, 15 bp, Homo sapiens
aatccaagttcttaa

SEQ ID NO: 1884265 - DNA, 15 bp, Homo sapiens
atccaagttcttaag

SEQ ID NO: 1884266 - DNA, 15 bp, Homo sapiens
tccaagttcttaagc

SEQ ID NO: 1884267 - DNA, 15 bp, Homo sapiens
ccaagttcttaagca

SEQ ID NO: 1884268 - DNA, 15 bp, Homo sapiens
caagttcttaagcac

SEQ ID NO: 1884269 - DNA, 15 bp, Homo sapiens
aagttcttaagcact

SEQ ID NO: 1884270 - DNA, 15 bp, Homo sapiens
agttcttaagcactt

SEQ ID NO: 1884271 - DNA, 15 bp, Homo sapiens
gttcttaagcacttt

SEQ ID NO: 1884272 - DNA, 15 bp, Homo sapiens
ttcttaagcacttta

SEQ ID NO: 1884273 - DNA, 15 bp, Homo sapiens
tcttaagcactttaa

SEQ ID NO: 1884274 - DNA, 15 bp, Homo sapiens
cttaagcactttaaa

SEQ ID NO: 1884275 - DNA, 15 bp, Homo sapiens
ttaagcactttaaaa

SEQ ID NO: 1884276 - DNA, 15 bp, Homo sapiens
taagcactttaaaaa

SEQ ID NO: 1884277 - DNA, 15 bp, Homo sapiens
aagcactttaaaaaa

SEQ ID NO: 1884278 - DNA, 15 bp, Homo sapiens
agcactttaaaaaat

SEQ ID NO: 1884279 - DNA, 15 bp, Homo sapiens
gcactttaaaaaatt

SEQ ID NO: 1884280 - DNA, 15 bp, Homo sapiens
cactttaaaaaattg

SEQ ID NO: 1884281 - DNA, 15 bp, Homo sapiens
actttaaaaaattga

SEQ ID NO: 1884282 - DNA, 15 bp, Homo sapiens
ctttaaaaaattgaa

SEQ ID NO: 1884283 - DNA, 15 bp, Homo sapiens
tttaaaaaattgaat

SEQ ID NO: 1884284 - DNA, 15 bp, Homo sapiens
ttaaaaaattgaatt

SEQ ID NO: 1884285 - DNA, 15 bp, Homo sapiens
taaaaaattgaattg

SEQ ID NO: 1884286 - DNA, 15 bp, Homo sapiens
aaaaaattgaattga

SEQ ID NO: 1884287 - DNA, 15 bp, Homo sapiens
aaaaattgaattgac

SEQ ID NO: 1884288 - DNA, 15 bp, Homo sapiens
aaaattgaattgacc

SEQ ID NO: 1884289 - DNA, 15 bp, Homo sapiens
aaattgaattgacct

SEQ ID NO: 1884290 - DNA, 15 bp, Homo sapiens
aattgaattgacctt

SEQ ID NO: 1884291 - DNA, 15 bp, Homo sapiens
attgaattgaccttg

SEQ ID NO: 1884292 - DNA, 15 bp, Homo sapiens
ttgaattgaccttgt

SEQ ID NO: 1884293 - DNA, 15 bp, Homo sapiens
tgaattgaccttgtc

SEQ ID NO: 1884294 - DNA, 15 bp, Homo sapiens
gaattgaccttgtcc

SEQ ID NO: 1884295 - DNA, 15 bp, Homo sapiens
aattgaccttgtcca

SEQ ID NO: 1884296 - DNA, 15 bp, Homo sapiens
attgaccttgtccag

SEQ ID NO: 1884297 - DNA, 15 bp, Homo sapiens
ttgaccttgtccaga

SEQ ID NO: 1884298 - DNA, 15 bp, Homo sapiens
tgaccttgtccagaa

SEQ ID NO: 1884299 - DNA, 15 bp, Homo sapiens
gaccttgtccagaac

SEQ ID NO: 1884300 - DNA, 15 bp, Homo sapiens
accttgtccagaacc

SEQ ID NO: 1884301 - DNA, 15 bp, Homo sapiens
ccttgtccagaacct

SEQ ID NO: 1884302 - DNA, 15 bp, Homo sapiens
cttgtccagaacctc

SEQ ID NO: 1884303 - DNA, 15 bp, Homo sapiens
ttgtccagaacctct

SEQ ID NO: 1884304 - DNA, 15 bp, Homo sapiens
tgtccagaacctcta

SEQ ID NO: 1884305 - DNA, 15 bp, Homo sapiens
gtccagaacctctat

SEQ ID NO: 1884306 - DNA, 15 bp, Homo sapiens
tccagaacctctatg

SEQ ID NO: 1884307 - DNA, 15 bp, Homo sapiens
ccagaacctctatga

SEQ ID NO: 1884308 - DNA, 15 bp, Homo sapiens
cagaacctctatgag

SEQ ID NO: 1884309 - DNA, 15 bp, Homo sapiens
agaacctctatgagg

SEQ ID NO: 1884310 - DNA, 15 bp, Homo sapiens
gaacctctatgaggt

SEQ ID NO: 1884311 - DNA, 15 bp, Homo sapiens
aacctctatgaggtg

SEQ ID NO: 1884312 - DNA, 15 bp, Homo sapiens
acctctatgaggtgt

SEQ ID NO: 1884313 - DNA, 15 bp, Homo sapiens
cctctatgaggtgta

SEQ ID NO: 1884314 - DNA, 15 bp, Homo sapiens
ctctatgaggtgtat

SEQ ID NO: 1884315 - DNA, 15 bp, Homo sapiens
tctatgaggtgtata

SEQ ID NO: 1884316 - DNA, 15 bp, Homo sapiens
ctatgaggtgtataa

SEQ ID NO: 1884317 - DNA, 15 bp, Homo sapiens
tatgaggtgtataaa

SEQ ID NO: 1884318 - DNA, 15 bp, Homo sapiens
atgaggtgtataaac

SEQ ID NO: 1884319 - DNA, 15 bp, Homo sapiens
tgaggtgtataaacc

SEQ ID NO: 1884320 - DNA, 15 bp, Homo sapiens
gaggtgtataaacca

SEQ ID NO: 1884321 - DNA, 15 bp, Homo sapiens
aggtgtataaaccaa

SEQ ID NO: 1884322 - DNA, 15 bp, Homo sapiens
ggtgtataaaccaag

SEQ ID NO: 1884323 - DNA, 15 bp, Homo sapiens
gtgtataaaccaaga

SEQ ID NO: 1884324 - DNA, 15 bp, Homo sapiens
tgtataaaccaagat

SEQ ID NO: 1884325 - DNA, 15 bp, Homo sapiens
gtataaaccaagatt

SEQ ID NO: 1884326 - DNA, 15 bp, Homo sapiens
tataaaccaagatta

SEQ ID NO: 1884327 - DNA, 15 bp, Homo sapiens
ataaaccaagattaa

SEQ ID NO: 1884328 - DNA, 15 bp, Homo sapiens
taaaccaagattaac

SEQ ID NO: 1884329 - DNA, 15 bp, Homo sapiens
aaaccaagattaaca

SEQ ID NO: 1884330 - DNA, 15 bp, Homo sapiens
aaccaagattaacat

SEQ ID NO: 1884331 - DNA, 15 bp, Homo sapiens
accaagattaacata

SEQ ID NO: 1884332 - DNA, 15 bp, Homo sapiens
ccaagattaacataa

SEQ ID NO: 1884333 - DNA, 15 bp, Homo sapiens
caagattaacataat

SEQ ID NO: 1884334 - DNA, 15 bp, Homo sapiens
aagattaacataatt

SEQ ID NO: 1884335 - DNA, 15 bp, Homo sapiens
agattaacataatta

SEQ ID NO: 1884336 - DNA, 15 bp, Homo sapiens
gattaacataattat

SEQ ID NO: 1884337 - DNA, 15 bp, Homo sapiens
attaacataattatt

SEQ ID NO: 1884338 - DNA, 15 bp, Homo sapiens
aacataattattaag

SEQ ID NO: 1884339 - DNA, 15 bp, Homo sapiens
acataattattaagc

SEQ ID NO: 1884340 - DNA, 15 bp, Homo sapiens
cataattattaagca

SEQ ID NO: 1884341 - DNA, 15 bp, Homo sapiens
ataattattaagcaa

SEQ ID NO: 1884342 - DNA, 15 bp, Homo sapiens
taattattaagcaat

SEQ ID NO: 1884343 - DNA, 15 bp, Homo sapiens
aattattaagcaatt

SEQ ID NO: 1884344 - DNA, 15 bp, Homo sapiens
attattaagcaatta

SEQ ID NO: 1884345 - DNA, 15 bp, Homo sapiens
ttattaagcaattaa

SEQ ID NO: 1884346 - DNA, 15 bp, Homo sapiens
tattaagcaattaaa

SEQ ID NO: 1884347 - DNA, 15 bp, Homo sapiens
attaagcaattaaaa

SEQ ID NO: 1884348 - DNA, 15 bp, Homo sapiens
ttaagcaattaaaat

SEQ ID NO: 1884349 - DNA, 15 bp, Homo sapiens
taagcaattaaaata

SEQ ID NO: 1884350 - DNA, 15 bp, Homo sapiens
aagcaattaaaataa

SEQ ID NO: 1884351 - DNA, 15 bp, Homo sapiens
agcaattaaaataat

SEQ ID NO: 1884352 - DNA, 15 bp, Homo sapiens
gcaattaaaataata

SEQ ID NO: 1884353 - DNA, 15 bp, Homo sapiens
caattaaaataataa

SEQ ID NO: 1884354 - DNA, 15 bp, Homo sapiens
aattaaaataataat

SEQ ID NO: 1884355 - DNA, 15 bp, Homo sapiens
attaaaataataatt

SEQ ID NO: 1884356 - DNA, 15 bp, Homo sapiens
ttaaaataataattt

SEQ ID NO: 1884357 - DNA, 15 bp, Homo sapiens
taaaataataatttt

SEQ ID NO: 1884358 - DNA, 15 bp, Homo sapiens
aaaataataatttta

SEQ ID NO: 1884359 - DNA, 15 bp, Homo sapiens
aaataataattttag

SEQ ID NO: 1884360 - DNA, 15 bp, Homo sapiens
aataataattttagt

SEQ ID NO: 1884361 - DNA, 15 bp, Homo sapiens
ataataattttagta

SEQ ID NO: 1884362 - DNA, 15 bp, Homo sapiens
taataattttagtaa

SEQ ID NO: 1884363 - DNA, 15 bp, Homo sapiens
aataattttagtaaa

SEQ ID NO: 1884364 - DNA, 15 bp, Homo sapiens
ataattttagtaaaa

SEQ ID NO: 1884365 - DNA, 15 bp, Homo sapiens
taattttagtaaaat

SEQ ID NO: 1884366 - DNA, 15 bp, Homo sapiens
aattttagtaaaatt

SEQ ID NO: 1884367 - DNA, 15 bp, Homo sapiens
attttagtaaaattc

SEQ ID NO: 1884368 - DNA, 15 bp, Homo sapiens
ttttagtaaaattct

SEQ ID NO: 1884369 - DNA, 15 bp, Homo sapiens
tttagtaaaattctg

SEQ ID NO: 1884370 - DNA, 15 bp, Homo sapiens
ttagtaaaattctgt

SEQ ID NO: 1884371 - DNA, 15 bp, Homo sapiens
tagtaaaattctgta

SEQ ID NO: 1884372 - DNA, 15 bp, Homo sapiens
agtaaaattctgtac

SEQ ID NO: 1884373 - DNA, 15 bp, Homo sapiens
gtaaaattctgtact

SEQ ID NO: 1884374 - DNA, 15 bp, Homo sapiens
taaaattctgtactg

SEQ ID NO: 1884375 - DNA, 15 bp, Homo sapiens
aaaattctgtactgc

SEQ ID NO: 1884376 - DNA, 15 bp, Homo sapiens
aaattctgtactgca

SEQ ID NO: 1884377 - DNA, 15 bp, Homo sapiens
aattctgtactgcag

SEQ ID NO: 1884378 - DNA, 15 bp, Homo sapiens
attctgtactgcagt

SEQ ID NO: 1884379 - DNA, 15 bp, Homo sapiens
ttctgtactgcagtg

SEQ ID NO: 1884380 - DNA, 15 bp, Homo sapiens
tctgtactgcagtgg

SEQ ID NO: 1884381 - DNA, 15 bp, Homo sapiens
ctgtactgcagtgga

SEQ ID NO: 1884382 - DNA, 15 bp, Homo sapiens
tgtactgcagtggat

SEQ ID NO: 1884383 - DNA, 15 bp, Homo sapiens
gtactgcagtggatg

SEQ ID NO: 1884384 - DNA, 15 bp, Homo sapiens
tactgcagtggatga

SEQ ID NO: 1884385 - DNA, 15 bp, Homo sapiens
actgcagtggatgac

SEQ ID NO: 1884386 - DNA, 15 bp, Homo sapiens
ctgcagtggatgaca

SEQ ID NO: 1884387 - DNA, 15 bp, Homo sapiens
tgcagtggatgacat

SEQ ID NO: 1884388 - DNA, 15 bp, Homo sapiens
gcagtggatgacatt

SEQ ID NO: 1884389 - DNA, 15 bp, Homo sapiens
cagtggatgacatta

SEQ ID NO: 1884390 - DNA, 15 bp, Homo sapiens
agtggatgacattat

SEQ ID NO: 1884391 - DNA, 15 bp, Homo sapiens
gtggatgacattatt

SEQ ID NO: 1884392 - DNA, 15 bp, Homo sapiens
tggatgacattattt

SEQ ID NO: 1884393 - DNA, 15 bp, Homo sapiens
ggatgacattatttc

SEQ ID NO: 1884394 - DNA, 15 bp, Homo sapiens
gatgacattatttct

SEQ ID NO: 1884395 - DNA, 15 bp, Homo sapiens
atgacattatttctg

SEQ ID NO: 1884396 - DNA, 15 bp, Homo sapiens
tgacattatttctga

SEQ ID NO: 1884397 - DNA, 15 bp, Homo sapiens
gacattatttctgaa

SEQ ID NO: 1884398 - DNA, 15 bp, Homo sapiens
acattatttctgaag

SEQ ID NO: 1884399 - DNA, 15 bp, Homo sapiens
cattatttctgaagt

SEQ ID NO: 1884400 - DNA, 15 bp, Homo sapiens
attatttctgaagtg

SEQ ID NO: 1884401 - DNA, 15 bp, Homo sapiens
ttatttctgaagtga

SEQ ID NO: 1884402 - DNA, 15 bp, Homo sapiens
tatttctgaagtgac

SEQ ID NO: 1884403 - DNA, 15 bp, Homo sapiens
atttctgaagtgaca

SEQ ID NO: 1884404 - DNA, 15 bp, Homo sapiens
tttctgaagtgacat

SEQ ID NO: 1884405 - DNA, 15 bp, Homo sapiens
ttctgaagtgacatt

SEQ ID NO: 1884406 - DNA, 15 bp, Homo sapiens
tctgaagtgacatta

SEQ ID NO: 1884407 - DNA, 15 bp, Homo sapiens
ctgaagtgacattaa

SEQ ID NO: 1884408 - DNA, 15 bp, Homo sapiens
tgaagtgacattaac

SEQ ID NO: 1884409 - DNA, 15 bp, Homo sapiens
gaagtgacattaacc

SEQ ID NO: 1884410 - DNA, 15 bp, Homo sapiens
aagtgacattaacct

SEQ ID NO: 1884411 - DNA, 15 bp, Homo sapiens
agtgacattaaccta

SEQ ID NO: 1884412 - DNA, 15 bp, Homo sapiens
gtgacattaacctaa

SEQ ID NO: 1884413 - DNA, 15 bp, Homo sapiens
tgacattaacctaac

SEQ ID NO: 1884414 - DNA, 15 bp, Homo sapiens
gacattaacctaact

SEQ ID NO: 1884415 - DNA, 15 bp, Homo sapiens
acattaacctaactt

SEQ ID NO: 1884416 - DNA, 15 bp, Homo sapiens
cattaacctaactta

SEQ ID NO: 1884417 - DNA, 15 bp, Homo sapiens
attaacctaacttac

SEQ ID NO: 1884418 - DNA, 15 bp, Homo sapiens
ttaacctaacttact

SEQ ID NO: 1884419 - DNA, 15 bp, Homo sapiens
taacctaacttactg

SEQ ID NO: 1884420 - DNA, 15 bp, Homo sapiens
aacctaacttactgt

SEQ ID NO: 1884421 - DNA, 15 bp, Homo sapiens
acctaacttactgta

SEQ ID NO: 1884422 - DNA, 15 bp, Homo sapiens
cctaacttactgtag

SEQ ID NO: 1884423 - DNA, 15 bp, Homo sapiens
ctaacttactgtagg

SEQ ID NO: 1884424 - DNA, 15 bp, Homo sapiens
taacttactgtagga

SEQ ID NO: 1884425 - DNA, 15 bp, Homo sapiens
aacttactgtaggaa

SEQ ID NO: 1884426 - DNA, 15 bp, Homo sapiens
acttactgtaggaac

SEQ ID NO: 1884427 - DNA, 15 bp, Homo sapiens
cttactgtaggaaca

SEQ ID NO: 1884428 - DNA, 15 bp, Homo sapiens
ttactgtaggaacag

SEQ ID NO: 1884429 - DNA, 15 bp, Homo sapiens
tactgtaggaacagt

SEQ ID NO: 1884430 - DNA, 15 bp, Homo sapiens
actgtaggaacagtt

SEQ ID NO: 1884431 - DNA, 15 bp, Homo sapiens
ctgtaggaacagttc

SEQ ID NO: 1884432 - DNA, 15 bp, Homo sapiens
tgtaggaacagttca

SEQ ID NO: 1884433 - DNA, 15 bp, Homo sapiens
gtaggaacagttcag

SEQ ID NO: 1884434 - DNA, 15 bp, Homo sapiens
taggaacagttcagt

SEQ ID NO: 1884435 - DNA, 15 bp, Homo sapiens
aggaacagttcagtg

SEQ ID NO: 1884436 - DNA, 15 bp, Homo sapiens
ggaacagttcagtgg

SEQ ID NO: 1884437 - DNA, 15 bp, Homo sapiens
gaacagttcagtggc

SEQ ID NO: 1884438 - DNA, 15 bp, Homo sapiens
aacagttcagtggca

SEQ ID NO: 1884439 - DNA, 15 bp, Homo sapiens
acagttcagtggcag

SEQ ID NO: 1884440 - DNA, 15 bp, Homo sapiens
cagttcagtggcagg

SEQ ID NO: 1884441 - DNA, 15 bp, Homo sapiens
agttcagtggcagga

SEQ ID NO: 1884442 - DNA, 15 bp, Homo sapiens
gttcagtggcaggat

SEQ ID NO: 1884443 - DNA, 15 bp, Homo sapiens
ttcagtggcaggatt

SEQ ID NO: 1884444 - DNA, 15 bp, Homo sapiens
tcagtggcaggattg

SEQ ID NO: 1884445 - DNA, 15 bp, Homo sapiens
cagtggcaggattgc

SEQ ID NO: 1884446 - DNA, 15 bp, Homo sapiens
agtggcaggattgcc

SEQ ID NO: 1884447 - DNA, 15 bp, Homo sapiens
gtggcaggattgcca

SEQ ID NO: 1884448 - DNA, 15 bp, Homo sapiens
tggcaggattgccag

SEQ ID NO: 1884449 - DNA, 15 bp, Homo sapiens
ggcaggattgccagt

SEQ ID NO: 1884450 - DNA, 15 bp, Homo sapiens
gcaggattgccagtg

SEQ ID NO: 1884451 - DNA, 15 bp, Homo sapiens
caggattgccagtgg

SEQ ID NO: 1884452 - DNA, 15 bp, Homo sapiens
aggattgccagtggt

SEQ ID NO: 1884453 - DNA, 15 bp, Homo sapiens
ggattgccagtggtt

SEQ ID NO: 1884454 - DNA, 15 bp, Homo sapiens
gattgccagtggttg

SEQ ID NO: 1884455 - DNA, 15 bp, Homo sapiens
attgccagtggttga

SEQ ID NO: 1884456 - DNA, 15 bp, Homo sapiens
ttgccagtggttgac

SEQ ID NO: 1884457 - DNA, 15 bp, Homo sapiens
tgccagtggttgaca

SEQ ID NO: 1884458 - DNA, 15 bp, Homo sapiens
gccagtggttgacag

SEQ ID NO: 1884459 - DNA, 15 bp, Homo sapiens
ccagtggttgacagc

SEQ ID NO: 1884460 - DNA, 15 bp, Homo sapiens
cagtggttgacagct

SEQ ID NO: 1884461 - DNA, 15 bp, Homo sapiens
agtggttgacagctc

SEQ ID NO: 1884462 - DNA, 15 bp, Homo sapiens
gtggttgacagctcg

SEQ ID NO: 1884463 - DNA, 15 bp, Homo sapiens
tggttgacagctcgg

SEQ ID NO: 1884464 - DNA, 15 bp, Homo sapiens
ggttgacagctcggg

SEQ ID NO: 1884465 - DNA, 15 bp, Homo sapiens
gttgacagctcgggc

SEQ ID NO: 1884466 - DNA, 15 bp, Homo sapiens
ttgacagctcgggct

SEQ ID NO: 1884467 - DNA, 15 bp, Homo sapiens
tgacagctcgggctc

SEQ ID NO: 1884468 - DNA, 15 bp, Homo sapiens
gacagctcgggctct

SEQ ID NO: 1884469 - DNA, 15 bp, Homo sapiens
acagctcgggctctg

SEQ ID NO: 1884470 - DNA, 15 bp, Homo sapiens
cagctcgggctctgg

SEQ ID NO: 1884471 - DNA, 15 bp, Homo sapiens
agctcgggctctggg

SEQ ID NO: 1884472 - DNA, 15 bp, Homo sapiens
gctcgggctctgggg

SEQ ID NO: 1884473 - DNA, 15 bp, Homo sapiens
ctcgggctctggggt

SEQ ID NO: 1884474 - DNA, 15 bp, Homo sapiens
tcgggctctggggtc

SEQ ID NO: 1884475 - DNA, 15 bp, Homo sapiens
cgggctctggggtca

SEQ ID NO: 1884476 - DNA, 15 bp, Homo sapiens
gggctctggggtcag

SEQ ID NO: 1884477 - DNA, 15 bp, Homo sapiens
ggctctggggtcaga

SEQ ID NO: 1884478 - DNA, 15 bp, Homo sapiens
gctctggggtcagac

SEQ ID NO: 1884479 - DNA, 15 bp, Homo sapiens
ctctggggtcagaca

SEQ ID NO: 1884480 - DNA, 15 bp, Homo sapiens
tctggggtcagacag

SEQ ID NO: 1884481 - DNA, 15 bp, Homo sapiens
ctggggtcagacaga

SEQ ID NO: 1884482 - DNA, 15 bp, Homo sapiens
tggggtcagacagat

SEQ ID NO: 1884483 - DNA, 15 bp, Homo sapiens
ggggtcagacagatg

SEQ ID NO: 1884484 - DNA, 15 bp, Homo sapiens
gggtcagacagatgt

SEQ ID NO: 1884485 - DNA, 15 bp, Homo sapiens
gtggcctaattttaa

SEQ ID NO: 1884486 - DNA, 15 bp, Homo sapiens
tggcctaattttaaa

SEQ ID NO: 1884487 - DNA, 15 bp, Homo sapiens
ggcctaattttaaag

SEQ ID NO: 1884488 - DNA, 15 bp, Homo sapiens
gcctaattttaaagc

SEQ ID NO: 1884489 - DNA, 15 bp, Homo sapiens
cctaattttaaagca

SEQ ID NO: 1884490 - DNA, 15 bp, Homo sapiens
ctaattttaaagcac

SEQ ID NO: 1884491 - DNA, 15 bp, Homo sapiens
taattttaaagcaca

SEQ ID NO: 1884492 - DNA, 15 bp, Homo sapiens
aattttaaagcacaa

SEQ ID NO: 1884493 - DNA, 15 bp, Homo sapiens
attttaaagcacaac

SEQ ID NO: 1884494 - DNA, 15 bp, Homo sapiens
ttttaaagcacaact

SEQ ID NO: 1884495 - DNA, 15 bp, Homo sapiens
tttaaagcacaactt

SEQ ID NO: 1884496 - DNA, 15 bp, Homo sapiens
ttaaagcacaacttt

SEQ ID NO: 1884497 - DNA, 15 bp, Homo sapiens
taaagcacaactttg

SEQ ID NO: 1884498 - DNA, 15 bp, Homo sapiens
aaagcacaactttga

SEQ ID NO: 1884499 - DNA, 15 bp, Homo sapiens
aagcacaactttgac

SEQ ID NO: 1884500 - DNA, 15 bp, Homo sapiens
agcacaactttgaca

SEQ ID NO: 1884501 - DNA, 15 bp, Homo sapiens
gcacaactttgacat

SEQ ID NO: 1884502 - DNA, 15 bp, Homo sapiens
cacaactttgacatg

SEQ ID NO: 1884503 - DNA, 15 bp, Homo sapiens
acaactttgacatgt

SEQ ID NO: 1884504 - DNA, 15 bp, Homo sapiens
caactttgacatgtg

SEQ ID NO: 1884505 - DNA, 15 bp, Homo sapiens
aactttgacatgtgc

SEQ ID NO: 1884506 - DNA, 15 bp, Homo sapiens
actttgacatgtgct

SEQ ID NO: 1884507 - DNA, 15 bp, Homo sapiens
ctttgacatgtgctc

SEQ ID NO: 1884508 - DNA, 15 bp, Homo sapiens
tttgacatgtgctca

SEQ ID NO: 1884509 - DNA, 15 bp, Homo sapiens
ttgacatgtgctcat

SEQ ID NO: 1884510 - DNA, 15 bp, Homo sapiens
tgacatgtgctcatg

SEQ ID NO: 1884511 - DNA, 15 bp, Homo sapiens
gacatgtgctcatgt

SEQ ID NO: 1884512 - DNA, 15 bp, Homo sapiens
acatgtgctcatgtg

SEQ ID NO: 1884513 - DNA, 15 bp, Homo sapiens
catgtgctcatgtgt

SEQ ID NO: 1884514 - DNA, 15 bp, Homo sapiens
atgtgctcatgtgtg

SEQ ID NO: 1884515 - DNA, 15 bp, Homo sapiens
tgtgctcatgtgtga

SEQ ID NO: 1884516 - DNA, 15 bp, Homo sapiens
gtgctcatgtgtgac

SEQ ID NO: 1884517 - DNA, 15 bp, Homo sapiens
tgctcatgtgtgacc

SEQ ID NO: 1884518 - DNA, 15 bp, Homo sapiens
gctcatgtgtgacct

SEQ ID NO: 1884519 - DNA, 15 bp, Homo sapiens
ctcatgtgtgacctc

SEQ ID NO: 1884520 - DNA, 15 bp, Homo sapiens
tcatgtgtgacctct

SEQ ID NO: 1884521 - DNA, 15 bp, Homo sapiens
catgtgtgacctcta

SEQ ID NO: 1884522 - DNA, 15 bp, Homo sapiens
atgtgtgacctctag

SEQ ID NO: 1884523 - DNA, 15 bp, Homo sapiens
tgtgtgacctctagg

SEQ ID NO: 1884524 - DNA, 15 bp, Homo sapiens
gtgtgacctctaggt

SEQ ID NO: 1884525 - DNA, 15 bp, Homo sapiens
tgtgacctctaggtt

SEQ ID NO: 1884526 - DNA, 15 bp, Homo sapiens
gtgacctctaggttg

SEQ ID NO: 1884527 - DNA, 15 bp, Homo sapiens
tgacctctaggttgc

SEQ ID NO: 1884528 - DNA, 15 bp, Homo sapiens
gacctctaggttgct

SEQ ID NO: 1884529 - DNA, 15 bp, Homo sapiens
acctctaggttgctt

SEQ ID NO: 1884530 - DNA, 15 bp, Homo sapiens
cctctaggttgcttg

SEQ ID NO: 1884531 - DNA, 15 bp, Homo sapiens
ctctaggttgcttgt

SEQ ID NO: 1884532 - DNA, 15 bp, Homo sapiens
tctaggttgcttgtt

SEQ ID NO: 1884533 - DNA, 15 bp, Homo sapiens
ctaggttgcttgttt

SEQ ID NO: 1884534 - DNA, 15 bp, Homo sapiens
taggttgcttgtttc

SEQ ID NO: 1884535 - DNA, 15 bp, Homo sapiens
aggttgcttgtttct

SEQ ID NO: 1884536 - DNA, 15 bp, Homo sapiens
ggttgcttgtttctt

SEQ ID NO: 1884537 - DNA, 15 bp, Homo sapiens
gttgcttgtttctta

SEQ ID NO: 1884538 - DNA, 15 bp, Homo sapiens
ttgcttgtttcttaa

SEQ ID NO: 1884539 - DNA, 15 bp, Homo sapiens
tgcttgtttcttaaa

SEQ ID NO: 1884540 - DNA, 15 bp, Homo sapiens
gcttgtttcttaaaa

SEQ ID NO: 1884541 - DNA, 15 bp, Homo sapiens
cttgtttcttaaaat

SEQ ID NO: 1884542 - DNA, 15 bp, Homo sapiens
ttgtttcttaaaata

SEQ ID NO: 1884543 - DNA, 15 bp, Homo sapiens
tgtttcttaaaataa

SEQ ID NO: 1884544 - DNA, 15 bp, Homo sapiens
gtttcttaaaataaa

SEQ ID NO: 1884545 - DNA, 15 bp, Homo sapiens
tttcttaaaataaaa

SEQ ID NO: 1884546 - DNA, 15 bp, Homo sapiens
ttcttaaaataaaaa

SEQ ID NO: 1884547 - DNA, 15 bp, Homo sapiens
tcttaaaataaaaat

SEQ ID NO: 1884548 - DNA, 15 bp, Homo sapiens
cttaaaataaaaata

SEQ ID NO: 1884549 - DNA, 15 bp, Homo sapiens
ttaaaataaaaatat

SEQ ID NO: 1884550 - DNA, 15 bp, Homo sapiens
aaaataaaaatatac

SEQ ID NO: 1884551 - DNA, 15 bp, Homo sapiens
aaataaaaatatacc

SEQ ID NO: 1884552 - DNA, 15 bp, Homo sapiens
aataaaaatatacct

SEQ ID NO: 1884553 - DNA, 15 bp, Homo sapiens
ataaaaatatacctg

SEQ ID NO: 1884554 - DNA, 15 bp, Homo sapiens
taaaaatatacctgt

SEQ ID NO: 1884555 - DNA, 15 bp, Homo sapiens
aaaaatatacctgtc

SEQ ID NO: 1884556 - DNA, 15 bp, Homo sapiens
aaaatatacctgtct

SEQ ID NO: 1884557 - DNA, 15 bp, Homo sapiens
aaatatacctgtctt

SEQ ID NO: 1884558 - DNA, 15 bp, Homo sapiens
aatatacctgtcttg

SEQ ID NO: 1884559 - DNA, 15 bp, Homo sapiens
atatacctgtcttgc

SEQ ID NO: 1884560 - DNA, 15 bp, Homo sapiens
tatacctgtcttgca

SEQ ID NO: 1884561 - DNA, 15 bp, Homo sapiens
atacctgtcttgcac

SEQ ID NO: 1884562 - DNA, 15 bp, Homo sapiens
tacctgtcttgcacc

SEQ ID NO: 1884563 - DNA, 15 bp, Homo sapiens
acctgtcttgcacct

SEQ ID NO: 1884564 - DNA, 15 bp, Homo sapiens
cctgtcttgcacctt

SEQ ID NO: 1884565 - DNA, 15 bp, Homo sapiens
ctgtcttgcaccttc

SEQ ID NO: 1884566 - DNA, 15 bp, Homo sapiens
tgtcttgcaccttca

SEQ ID NO: 1884567 - DNA, 15 bp, Homo sapiens
gtcttgcaccttcaa

SEQ ID NO: 1884568 - DNA, 15 bp, Homo sapiens
tcttgcaccttcaat

SEQ ID NO: 1884569 - DNA, 15 bp, Homo sapiens
cttgcaccttcaatt

SEQ ID NO: 1884570 - DNA, 15 bp, Homo sapiens
ttgcaccttcaattt

SEQ ID NO: 1884571 - DNA, 15 bp, Homo sapiens
tgcaccttcaattta

SEQ ID NO: 1884572 - DNA, 15 bp, Homo sapiens
atattgtgtaaattt

SEQ ID NO: 1884573 - DNA, 15 bp, Homo sapiens
tattgtgtaaatttt

SEQ ID NO: 1884574 - DNA, 15 bp, Homo sapiens
attgtgtaaatttta

SEQ ID NO: 1884575 - DNA, 15 bp, Homo sapiens
ttgtgtaaattttaa

SEQ ID NO: 1884576 - DNA, 15 bp, Homo sapiens
tgtgtaaattttaag

SEQ ID NO: 1884577 - DNA, 15 bp, Homo sapiens
gtgtaaattttaagt

SEQ ID NO: 1884578 - DNA, 15 bp, Homo sapiens
tgtaaattttaagtg

SEQ ID NO: 1884579 - DNA, 15 bp, Homo sapiens
gtaaattttaagtgg

SEQ ID NO: 1884580 - DNA, 15 bp, Homo sapiens
taaattttaagtggg

SEQ ID NO: 1884581 - DNA, 15 bp, Homo sapiens
aaattttaagtggga

SEQ ID NO: 1884582 - DNA, 15 bp, Homo sapiens
aattttaagtgggat

SEQ ID NO: 1884583 - DNA, 15 bp, Homo sapiens
attttaagtgggatc

SEQ ID NO: 1884584 - DNA, 15 bp, Homo sapiens
ttttaagtgggatcc

SEQ ID NO: 1884585 - DNA, 15 bp, Homo sapiens
tttaagtgggatcct

SEQ ID NO: 1884586 - DNA, 15 bp, Homo sapiens
ttaagtgggatcctg

SEQ ID NO: 1884587 - DNA, 15 bp, Homo sapiens
taagtgggatcctgc

SEQ ID NO: 1884588 - DNA, 15 bp, Homo sapiens
aagtgggatcctgcc

SEQ ID NO: 1884589 - DNA, 15 bp, Homo sapiens
agtgggatcctgccc

SEQ ID NO: 1884590 - DNA, 15 bp, Homo sapiens
gtgggatcctgccct

SEQ ID NO: 1884591 - DNA, 15 bp, Homo sapiens
tgggatcctgcccta

SEQ ID NO: 1884592 - DNA, 15 bp, Homo sapiens
gggatcctgccctaa

SEQ ID NO: 1884593 - DNA, 15 bp, Homo sapiens
ggatcctgccctaat

SEQ ID NO: 1884594 - DNA, 15 bp, Homo sapiens
gatcctgccctaatt

SEQ ID NO: 1884595 - DNA, 15 bp, Homo sapiens
atcctgccctaattt

SEQ ID NO: 1884596 - DNA, 15 bp, Homo sapiens
tcctgccctaattta

SEQ ID NO: 1884597 - DNA, 15 bp, Homo sapiens
cctgccctaatttag

SEQ ID NO: 1884598 - DNA, 15 bp, Homo sapiens
ctgccctaatttaga

SEQ ID NO: 1884599 - DNA, 15 bp, Homo sapiens
tgccctaatttagaa

SEQ ID NO: 1884600 - DNA, 15 bp, Homo sapiens
gccctaatttagaaa

SEQ ID NO: 1884601 - DNA, 15 bp, Homo sapiens
ccctaatttagaaat

SEQ ID NO: 1884602 - DNA, 15 bp, Homo sapiens
cctaatttagaaata

SEQ ID NO: 1884603 - DNA, 15 bp, Homo sapiens
ctaatttagaaataa

SEQ ID NO: 1884604 - DNA, 15 bp, Homo sapiens
taatttagaaataag

SEQ ID NO: 1884605 - DNA, 15 bp, Homo sapiens
aatttagaaataagt

SEQ ID NO: 1884606 - DNA, 15 bp, Homo sapiens
atttagaaataagta

SEQ ID NO: 1884607 - DNA, 15 bp, Homo sapiens
tttagaaataagtac

SEQ ID NO: 1884608 - DNA, 15 bp, Homo sapiens
ttagaaataagtaca

SEQ ID NO: 1884609 - DNA, 15 bp, Homo sapiens
tagaaataagtacat

SEQ ID NO: 1884610 - DNA, 15 bp, Homo sapiens
agaaataagtacatc

SEQ ID NO: 1884611 - DNA, 15 bp, Homo sapiens
gaaataagtacatct

SEQ ID NO: 1884612 - DNA, 15 bp, Homo sapiens
aaataagtacatctt

SEQ ID NO: 1884613 - DNA, 15 bp, Homo sapiens
aataagtacatcttc

SEQ ID NO: 1884614 - DNA, 15 bp, Homo sapiens
ataagtacatcttct

SEQ ID NO: 1884615 - DNA, 15 bp, Homo sapiens
taagtacatcttctt

SEQ ID NO: 1884616 - DNA, 15 bp, Homo sapiens
aagtacatcttcttt

SEQ ID NO: 1884617 - DNA, 15 bp, Homo sapiens
agtacatcttcttta

SEQ ID NO: 1884618 - DNA, 15 bp, Homo sapiens
gtacatcttctttaa

SEQ ID NO: 1884619 - DNA, 15 bp, Homo sapiens
tacatcttctttaaa

SEQ ID NO: 1884620 - DNA, 15 bp, Homo sapiens
acatcttctttaaat

SEQ ID NO: 1884621 - DNA, 15 bp, Homo sapiens
catcttctttaaatg

SEQ ID NO: 1884622 - DNA, 15 bp, Homo sapiens
atcttctttaaatga

SEQ ID NO: 1884623 - DNA, 15 bp, Homo sapiens
tcttctttaaatgaa

SEQ ID NO: 1884624 - DNA, 15 bp, Homo sapiens
cttctttaaatgaaa

SEQ ID NO: 1884625 - DNA, 15 bp, Homo sapiens
ttctttaaatgaaaa

SEQ ID NO: 1884626 - DNA, 15 bp, Homo sapiens
tctttaaatgaaaac

SEQ ID NO: 1884627 - DNA, 15 bp, Homo sapiens
ctttaaatgaaaaca

SEQ ID NO: 1884628 - DNA, 15 bp, Homo sapiens
tttaaatgaaaacac

SEQ ID NO: 1884629 - DNA, 15 bp, Homo sapiens
ttaaatgaaaacacg

SEQ ID NO: 1884630 - DNA, 15 bp, Homo sapiens
taaatgaaaacacgt

SEQ ID NO: 1884631 - DNA, 15 bp, Homo sapiens
aaatgaaaacacgta

SEQ ID NO: 1884632 - DNA, 15 bp, Homo sapiens
aatgaaaacacgtat

SEQ ID NO: 1884633 - DNA, 15 bp, Homo sapiens
atgaaaacacgtatt

SEQ ID NO: 1884634 - DNA, 15 bp, Homo sapiens
tgaaaacacgtattc

SEQ ID NO: 1884635 - DNA, 15 bp, Homo sapiens
gaaaacacgtattcc

SEQ ID NO: 1884636 - DNA, 15 bp, Homo sapiens
aaaacacgtattcct

SEQ ID NO: 1884637 - DNA, 15 bp, Homo sapiens
aaacacgtattcctg

SEQ ID NO: 1884638 - DNA, 15 bp, Homo sapiens
aacacgtattcctgt

SEQ ID NO: 1884639 - DNA, 15 bp, Homo sapiens
acacgtattcctgtt

SEQ ID NO: 1884640 - DNA, 15 bp, Homo sapiens
cacgtattcctgtta

SEQ ID NO: 1884641 - DNA, 15 bp, Homo sapiens
acgtattcctgttat

SEQ ID NO: 1884642 - DNA, 15 bp, Homo sapiens
cgtattcctgttatg

SEQ ID NO: 1884643 - DNA, 15 bp, Homo sapiens
gtattcctgttatgt

SEQ ID NO: 1884644 - DNA, 15 bp, Homo sapiens
tattcctgttatgtg

SEQ ID NO: 1884645 - DNA, 15 bp, Homo sapiens
attcctgttatgtgt

SEQ ID NO: 1884646 - DNA, 15 bp, Homo sapiens
ttcctgttatgtgta

SEQ ID NO: 1884647 - DNA, 15 bp, Homo sapiens
tcctgttatgtgtat

SEQ ID NO: 1884648 - DNA, 15 bp, Homo sapiens
cctgttatgtgtata

SEQ ID NO: 1884649 - DNA, 15 bp, Homo sapiens
ctgttatgtgtatat

SEQ ID NO: 1884650 - DNA, 15 bp, Homo sapiens
tgttatgtgtatatc

SEQ ID NO: 1884651 - DNA, 15 bp, Homo sapiens
gttatgtgtatatcc

SEQ ID NO: 1884652 - DNA, 15 bp, Homo sapiens
ttatgtgtatatcct

SEQ ID NO: 1884653 - DNA, 15 bp, Homo sapiens
tatgtgtatatcctt

SEQ ID NO: 1884654 - DNA, 15 bp, Homo sapiens
atgtgtatatccttt

SEQ ID NO: 1884655 - DNA, 15 bp, Homo sapiens
tgtgtatatccttta

SEQ ID NO: 1884656 - DNA, 15 bp, Homo sapiens
gtgtatatcctttac

SEQ ID NO: 1884657 - DNA, 15 bp, Homo sapiens
tgtatatcctttact

SEQ ID NO: 1884658 - DNA, 15 bp, Homo sapiens
gtatatcctttacta

SEQ ID NO: 1884659 - DNA, 15 bp, Homo sapiens
tatatcctttactat

SEQ ID NO: 1884660 - DNA, 15 bp, Homo sapiens
atatcctttactatt

SEQ ID NO: 1884661 - DNA, 15 bp, Homo sapiens
tatcctttactattt

SEQ ID NO: 1884662 - DNA, 15 bp, Homo sapiens
atcctttactatttt

SEQ ID NO: 1884663 - DNA, 15 bp, Homo sapiens
tcctttactatttta

SEQ ID NO: 1884664 - DNA, 15 bp, Homo sapiens
cctttactattttaa

SEQ ID NO: 1884665 - DNA, 15 bp, Homo sapiens
ctttactattttaac

SEQ ID NO: 1884666 - DNA, 15 bp, Homo sapiens
tttactattttaaca

SEQ ID NO: 1884667 - DNA, 15 bp, Homo sapiens
ttactattttaacaa

SEQ ID NO: 1884668 - DNA, 15 bp, Homo sapiens
tactattttaacaaa

SEQ ID NO: 1884669 - DNA, 15 bp, Homo sapiens
actattttaacaaat

SEQ ID NO: 1884670 - DNA, 15 bp, Homo sapiens
ctattttaacaaata

SEQ ID NO: 1884671 - DNA, 15 bp, Homo sapiens
tattttaacaaatat

SEQ ID NO: 1884672 - DNA, 15 bp, Homo sapiens
attttaacaaatatt

SEQ ID NO: 1884673 - DNA, 15 bp, Homo sapiens
ttttaacaaatattt

SEQ ID NO: 1884674 - DNA, 15 bp, Homo sapiens
tttaacaaatatttg

SEQ ID NO: 1884675 - DNA, 15 bp, Homo sapiens
ttaacaaatatttgt

SEQ ID NO: 1884676 - DNA, 15 bp, Homo sapiens
taacaaatatttgtt

SEQ ID NO: 1884677 - DNA, 15 bp, Homo sapiens
aacaaatatttgttg

SEQ ID NO: 1884678 - DNA, 15 bp, Homo sapiens
acaaatatttgttga

SEQ ID NO: 1884679 - DNA, 15 bp, Homo sapiens
caaatatttgttgag

SEQ ID NO: 1884680 - DNA, 15 bp, Homo sapiens
aaatatttgttgaga

SEQ ID NO: 1884681 - DNA, 15 bp, Homo sapiens
aatatttgttgagat

SEQ ID NO: 1884682 - DNA, 15 bp, Homo sapiens
atatttgttgagatt

SEQ ID NO: 1884683 - DNA, 15 bp, Homo sapiens
tatttgttgagatta

SEQ ID NO: 1884684 - DNA, 15 bp, Homo sapiens
atttgttgagattac

SEQ ID NO: 1884685 - DNA, 15 bp, Homo sapiens
tttgttgagattaca

SEQ ID NO: 1884686 - DNA, 15 bp, Homo sapiens
ttgttgagattacac

SEQ ID NO: 1884687 - DNA, 15 bp, Homo sapiens
tgttgagattacaca

SEQ ID NO: 1884688 - DNA, 15 bp, Homo sapiens
gttgagattacacac

SEQ ID NO: 1884689 - DNA, 15 bp, Homo sapiens
ttgagattacacaca

SEQ ID NO: 1884690 - DNA, 15 bp, Homo sapiens
tgagattacacacat

SEQ ID NO: 1884691 - DNA, 15 bp, Homo sapiens
gagattacacacatg

SEQ ID NO: 1884692 - DNA, 15 bp, Homo sapiens
agattacacacatgt

SEQ ID NO: 1884693 - DNA, 15 bp, Homo sapiens
gattacacacatgtt

SEQ ID NO: 1884694 - DNA, 15 bp, Homo sapiens
attacacacatgttc

SEQ ID NO: 1884695 - DNA, 15 bp, Homo sapiens
ttacacacatgttcc

SEQ ID NO: 1884696 - DNA, 15 bp, Homo sapiens
tacacacatgttccc

SEQ ID NO: 1884697 - DNA, 15 bp, Homo sapiens
acacacatgttccca

SEQ ID NO: 1884698 - DNA, 15 bp, Homo sapiens
cacacatgttcccag

SEQ ID NO: 1884699 - DNA, 15 bp, Homo sapiens
acacatgttcccaga

SEQ ID NO: 1884700 - DNA, 15 bp, Homo sapiens
cacatgttcccagag

SEQ ID NO: 1884701 - DNA, 15 bp, Homo sapiens
acatgttcccagagt

SEQ ID NO: 1884702 - DNA, 15 bp, Homo sapiens
catgttcccagagtg

SEQ ID NO: 1884703 - DNA, 15 bp, Homo sapiens
atgttcccagagtgc

SEQ ID NO: 1884704 - DNA, 15 bp, Homo sapiens
tgttcccagagtgct

SEQ ID NO: 1884705 - DNA, 15 bp, Homo sapiens
gttcccagagtgctt

SEQ ID NO: 1884706 - DNA, 15 bp, Homo sapiens
ttcccagagtgcttt

SEQ ID NO: 1884707 - DNA, 15 bp, Homo sapiens
tcccagagtgctttg

SEQ ID NO: 1884708 - DNA, 15 bp, Homo sapiens
cccagagtgctttgt

SEQ ID NO: 1884709 - DNA, 15 bp, Homo sapiens
ccagagtgctttgtg

SEQ ID NO: 1884710 - DNA, 15 bp, Homo sapiens
cagagtgctttgtgt

SEQ ID NO: 1884711 - DNA, 15 bp, Homo sapiens
agagtgctttgtgtt

SEQ ID NO: 1884712 - DNA, 15 bp, Homo sapiens
gagtgctttgtgttc

SEQ ID NO: 1884713 - DNA, 15 bp, Homo sapiens
agtgctttgtgttct

SEQ ID NO: 1884714 - DNA, 15 bp, Homo sapiens
gtgctttgtgttctc

SEQ ID NO: 1884715 - DNA, 15 bp, Homo sapiens
tgctttgtgttctcc

SEQ ID NO: 1884716 - DNA, 15 bp, Homo sapiens
gctttgtgttctcca

SEQ ID NO: 1884717 - DNA, 15 bp, Homo sapiens
ctttgtgttctccat

SEQ ID NO: 1884718 - DNA, 15 bp, Homo sapiens
tttgtgttctccatt

SEQ ID NO: 1884719 - DNA, 15 bp, Homo sapiens
ttgtgttctccatta

SEQ ID NO: 1884720 - DNA, 15 bp, Homo sapiens
tgtgttctccattat

SEQ ID NO: 1884721 - DNA, 15 bp, Homo sapiens
gtgttctccattatc

SEQ ID NO: 1884722 - DNA, 15 bp, Homo sapiens
tgttctccattatca

SEQ ID NO: 1884723 - DNA, 15 bp, Homo sapiens
gttctccattatcac

SEQ ID NO: 1884724 - DNA, 15 bp, Homo sapiens
ttctccattatcaca

SEQ ID NO: 1884725 - DNA, 15 bp, Homo sapiens
tctccattatcacac

SEQ ID NO: 1884726 - DNA, 15 bp, Homo sapiens
ctccattatcacact

SEQ ID NO: 1884727 - DNA, 15 bp, Homo sapiens
tccattatcacactg

SEQ ID NO: 1884728 - DNA, 15 bp, Homo sapiens
ccattatcacactgt

SEQ ID NO: 1884729 - DNA, 15 bp, Homo sapiens
cattatcacactgtg

SEQ ID NO: 1884730 - DNA, 15 bp, Homo sapiens
attatcacactgtgt

SEQ ID NO: 1884731 - DNA, 15 bp, Homo sapiens
ttatcacactgtgtt

SEQ ID NO: 1884732 - DNA, 15 bp, Homo sapiens
tatcacactgtgttg

SEQ ID NO: 1884733 - DNA, 15 bp, Homo sapiens
atcacactgtgttga

SEQ ID NO: 1884734 - DNA, 15 bp, Homo sapiens
tcacactgtgttgaa

SEQ ID NO: 1884735 - DNA, 15 bp, Homo sapiens
cacactgtgttgaaa

SEQ ID NO: 1884736 - DNA, 15 bp, Homo sapiens
acactgtgttgaaat

SEQ ID NO: 1884737 - DNA, 15 bp, Homo sapiens
cactgtgttgaaatt

SEQ ID NO: 1884738 - DNA, 15 bp, Homo sapiens
actgtgttgaaattg

SEQ ID NO: 1884739 - DNA, 15 bp, Homo sapiens
ctgtgttgaaattga

SEQ ID NO: 1884740 - DNA, 15 bp, Homo sapiens
tgtgttgaaattgat

SEQ ID NO: 1884741 - DNA, 15 bp, Homo sapiens
gtgttgaaattgatg

SEQ ID NO: 1884742 - DNA, 15 bp, Homo sapiens
tgttgaaattgatgg

SEQ ID NO: 1884743 - DNA, 15 bp, Homo sapiens
gttgaaattgatggt

SEQ ID NO: 1884744 - DNA, 15 bp, Homo sapiens
ttgaaattgatggtt

SEQ ID NO: 1884745 - DNA, 15 bp, Homo sapiens
tgaaattgatggttt

SEQ ID NO: 1884746 - DNA, 15 bp, Homo sapiens
gaaattgatggttta

SEQ ID NO: 1884747 - DNA, 15 bp, Homo sapiens
aaattgatggtttac

SEQ ID NO: 1884748 - DNA, 15 bp, Homo sapiens
aattgatggtttact

SEQ ID NO: 1884749 - DNA, 15 bp, Homo sapiens
attgatggtttactt

SEQ ID NO: 1884750 - DNA, 15 bp, Homo sapiens
ttgatggtttactta

SEQ ID NO: 1884751 - DNA, 15 bp, Homo sapiens
tgatggtttacttat

SEQ ID NO: 1884752 - DNA, 15 bp, Homo sapiens
gatggtttacttatt

SEQ ID NO: 1884753 - DNA, 15 bp, Homo sapiens
atggtttacttattt

SEQ ID NO: 1884754 - DNA, 15 bp, Homo sapiens
tggtttacttatttc

SEQ ID NO: 1884755 - DNA, 15 bp, Homo sapiens
ggtttacttatttcc

SEQ ID NO: 1884756 - DNA, 15 bp, Homo sapiens
gtttacttatttcct

SEQ ID NO: 1884757 - DNA, 15 bp, Homo sapiens
tttacttatttcctc

SEQ ID NO: 1884758 - DNA, 15 bp, Homo sapiens
ttacttatttcctcc

SEQ ID NO: 1884759 - DNA, 15 bp, Homo sapiens
tacttatttcctcca

SEQ ID NO: 1884760 - DNA, 15 bp, Homo sapiens
acttatttcctccag

SEQ ID NO: 1884761 - DNA, 15 bp, Homo sapiens
cttatttcctccagt

SEQ ID NO: 1884762 - DNA, 15 bp, Homo sapiens
ttatttcctccagtg

SEQ ID NO: 1884763 - DNA, 15 bp, Homo sapiens
tatttcctccagtgg

SEQ ID NO: 1884764 - DNA, 15 bp, Homo sapiens
atttcctccagtggg

SEQ ID NO: 1884765 - DNA, 15 bp, Homo sapiens
tttcctccagtgggt

SEQ ID NO: 1884766 - DNA, 15 bp, Homo sapiens
ttcctccagtgggtg

SEQ ID NO: 1884767 - DNA, 15 bp, Homo sapiens
tcctccagtgggtgc

SEQ ID NO: 1884768 - DNA, 15 bp, Homo sapiens
cctccagtgggtgct

SEQ ID NO: 1884769 - DNA, 15 bp, Homo sapiens
ctccagtgggtgctc

SEQ ID NO: 1884770 - DNA, 15 bp, Homo sapiens
tccagtgggtgctca

SEQ ID NO: 1884771 - DNA, 15 bp, Homo sapiens
ccagtgggtgctcaa

SEQ ID NO: 1884772 - DNA, 15 bp, Homo sapiens
cagtgggtgctcaaa

SEQ ID NO: 1884773 - DNA, 15 bp, Homo sapiens
agtgggtgctcaaat

SEQ ID NO: 1884774 - DNA, 15 bp, Homo sapiens
gtgggtgctcaaatt

SEQ ID NO: 1884775 - DNA, 15 bp, Homo sapiens
tgggtgctcaaatta

SEQ ID NO: 1884776 - DNA, 15 bp, Homo sapiens
gggtgctcaaattaa

SEQ ID NO: 1884777 - DNA, 15 bp, Homo sapiens
ggtgctcaaattaat

SEQ ID NO: 1884778 - DNA, 15 bp, Homo sapiens
gtgctcaaattaatg

SEQ ID NO: 1884779 - DNA, 15 bp, Homo sapiens
tgctcaaattaatgc

SEQ ID NO: 1884780 - DNA, 15 bp, Homo sapiens
gctcaaattaatgct

SEQ ID NO: 1884781 - DNA, 15 bp, Homo sapiens
ctcaaattaatgctc

SEQ ID NO: 1884782 - DNA, 15 bp, Homo sapiens
tcaaattaatgctca

SEQ ID NO: 1884783 - DNA, 15 bp, Homo sapiens
caaattaatgctcag

SEQ ID NO: 1884784 - DNA, 15 bp, Homo sapiens
aaattaatgctcagt

SEQ ID NO: 1884785 - DNA, 15 bp, Homo sapiens
aattaatgctcagtg

SEQ ID NO: 1884786 - DNA, 15 bp, Homo sapiens
attaatgctcagtgg

SEQ ID NO: 1884787 - DNA, 15 bp, Homo sapiens
ttaatgctcagtgga

SEQ ID NO: 1884788 - DNA, 15 bp, Homo sapiens
taatgctcagtggat

SEQ ID NO: 1884789 - DNA, 15 bp, Homo sapiens
aatgctcagtggatg

SEQ ID NO: 1884790 - DNA, 15 bp, Homo sapiens
atgctcagtggatgg

SEQ ID NO: 1884791 - DNA, 15 bp, Homo sapiens
tgctcagtggatgga

SEQ ID NO: 1884792 - DNA, 15 bp, Homo sapiens
gctcagtggatggat

SEQ ID NO: 1884793 - DNA, 15 bp, Homo sapiens
ctcagtggatggatg

SEQ ID NO: 1884794 - DNA, 15 bp, Homo sapiens
tcagtggatggatgg

SEQ ID NO: 1884795 - DNA, 15 bp, Homo sapiens
cagtggatggatgga

SEQ ID NO: 1884796 - DNA, 15 bp, Homo sapiens
agtggatggatggat

SEQ ID NO: 1884797 - DNA, 15 bp, Homo sapiens
gtggatggatggatg

SEQ ID NO: 1884798 - DNA, 15 bp, Homo sapiens
tggatggatggatgt

SEQ ID NO: 1884799 - DNA, 15 bp, Homo sapiens
ggatggatggatgtt

SEQ ID NO: 1884800 - DNA, 15 bp, Homo sapiens
gatggatggatgttg

SEQ ID NO: 1884801 - DNA, 15 bp, Homo sapiens
atggatggatgttga

SEQ ID NO: 1884802 - DNA, 15 bp, Homo sapiens
tggatggatgttgaa

SEQ ID NO: 1884803 - DNA, 15 bp, Homo sapiens
ggatggatgttgaat

SEQ ID NO: 1884804 - DNA, 15 bp, Homo sapiens
gatggatgttgaatg

SEQ ID NO: 1884805 - DNA, 15 bp, Homo sapiens
atggatgttgaatgt

SEQ ID NO: 1884806 - DNA, 15 bp, Homo sapiens
tggatgttgaatgta

SEQ ID NO: 1884807 - DNA, 15 bp, Homo sapiens
ggatgttgaatgtac

SEQ ID NO: 1884808 - DNA, 15 bp, Homo sapiens
gatgttgaatgtaca

SEQ ID NO: 1884809 - DNA, 15 bp, Homo sapiens
atgttgaatgtacag

SEQ ID NO: 1884810 - DNA, 15 bp, Homo sapiens
tgttgaatgtacagg

SEQ ID NO: 1884811 - DNA, 15 bp, Homo sapiens
gttgaatgtacagga

SEQ ID NO: 1884812 - DNA, 15 bp, Homo sapiens
ttgaatgtacaggac

SEQ ID NO: 1884813 - DNA, 15 bp, Homo sapiens
tgaatgtacaggact

SEQ ID NO: 1884814 - DNA, 15 bp, Homo sapiens
gaatgtacaggactg

SEQ ID NO: 1884815 - DNA, 15 bp, Homo sapiens
aatgtacaggactga

SEQ ID NO: 1884816 - DNA, 15 bp, Homo sapiens
atgtacaggactgag

SEQ ID NO: 1884817 - DNA, 15 bp, Homo sapiens
tgtacaggactgagg

SEQ ID NO: 1884818 - DNA, 15 bp, Homo sapiens
gtacaggactgaggg

SEQ ID NO: 1884819 - DNA, 15 bp, Homo sapiens
tacaggactgagggt

SEQ ID NO: 1884820 - DNA, 15 bp, Homo sapiens
acaggactgagggta

SEQ ID NO: 1884821 - DNA, 15 bp, Homo sapiens
caggactgagggtag

SEQ ID NO: 1884822 - DNA, 15 bp, Homo sapiens
aggactgagggtagg

SEQ ID NO: 1884823 - DNA, 15 bp, Homo sapiens
ggactgagggtagga

SEQ ID NO: 1884824 - DNA, 15 bp, Homo sapiens
gactgagggtaggat

SEQ ID NO: 1884825 - DNA, 15 bp, Homo sapiens
actgagggtaggatc

SEQ ID NO: 1884826 - DNA, 15 bp, Homo sapiens
ctgagggtaggatcc

SEQ ID NO: 1884827 - DNA, 15 bp, Homo sapiens
tgagggtaggatcct

SEQ ID NO: 1884828 - DNA, 15 bp, Homo sapiens
gagggtaggatccta

SEQ ID NO: 1884829 - DNA, 15 bp, Homo sapiens
agggtaggatcctaa

SEQ ID NO: 1884830 - DNA, 15 bp, Homo sapiens
gggtaggatcctaat

SEQ ID NO: 1884831 - DNA, 15 bp, Homo sapiens
ggtaggatcctaatg

SEQ ID NO: 1884832 - DNA, 15 bp, Homo sapiens
gtaggatcctaatga

SEQ ID NO: 1884833 - DNA, 15 bp, Homo sapiens
taggatcctaatgaa

SEQ ID NO: 1884834 - DNA, 15 bp, Homo sapiens
aggatcctaatgaat

SEQ ID NO: 1884835 - DNA, 15 bp, Homo sapiens
ggatcctaatgaatc

SEQ ID NO: 1884836 - DNA, 15 bp, Homo sapiens
gatcctaatgaatca

SEQ ID NO: 1884837 - DNA, 15 bp, Homo sapiens
atcctaatgaatcac

SEQ ID NO: 1884838 - DNA, 15 bp, Homo sapiens
tcctaatgaatcacc

SEQ ID NO: 1884839 - DNA, 15 bp, Homo sapiens
cctaatgaatcacca

SEQ ID NO: 1884840 - DNA, 15 bp, Homo sapiens
ctaatgaatcaccac

SEQ ID NO: 1884841 - DNA, 15 bp, Homo sapiens
taatgaatcaccacg

SEQ ID NO: 1884842 - DNA, 15 bp, Homo sapiens
aatgaatcaccacgt

SEQ ID NO: 1884843 - DNA, 15 bp, Homo sapiens
atgaatcaccacgtg

SEQ ID NO: 1884844 - DNA, 15 bp, Homo sapiens
tgaatcaccacgtgg

SEQ ID NO: 1884845 - DNA, 15 bp, Homo sapiens
gaatcaccacgtggc

SEQ ID NO: 1884846 - DNA, 15 bp, Homo sapiens
aatcaccacgtggcc

SEQ ID NO: 1884847 - DNA, 15 bp, Homo sapiens
atcaccacgtggcct

SEQ ID NO: 1884848 - DNA, 15 bp, Homo sapiens
tcaccacgtggcctt

SEQ ID NO: 1884849 - DNA, 15 bp, Homo sapiens
caccacgtggccttc

SEQ ID NO: 1884850 - DNA, 15 bp, Homo sapiens
accacgtggccttca

SEQ ID NO: 1884851 - DNA, 15 bp, Homo sapiens
ccacgtggccttcaa

SEQ ID NO: 1884852 - DNA, 15 bp, Homo sapiens
cacgtggccttcaat

SEQ ID NO: 1884853 - DNA, 15 bp, Homo sapiens
acgtggccttcaatg

SEQ ID NO: 1884854 - DNA, 15 bp, Homo sapiens
cgtggccttcaatgt

SEQ ID NO: 1884855 - DNA, 15 bp, Homo sapiens
gtggccttcaatgtc

SEQ ID NO: 1884856 - DNA, 15 bp, Homo sapiens
tggccttcaatgtcc

SEQ ID NO: 1884857 - DNA, 15 bp, Homo sapiens
ggccttcaatgtcct

SEQ ID NO: 1884858 - DNA, 15 bp, Homo sapiens
gccttcaatgtcctt

SEQ ID NO: 1884859 - DNA, 15 bp, Homo sapiens
ccttcaatgtccttt

SEQ ID NO: 1884860 - DNA, 15 bp, Homo sapiens
cttcaatgtcctttg

SEQ ID NO: 1884861 - DNA, 15 bp, Homo sapiens
ttcaatgtcctttgg

SEQ ID NO: 1884862 - DNA, 15 bp, Homo sapiens
tcaatgtcctttgga

SEQ ID NO: 1884863 - DNA, 15 bp, Homo sapiens
caatgtcctttggat

SEQ ID NO: 1884864 - DNA, 15 bp, Homo sapiens
aatgtcctttggatt

SEQ ID NO: 1884865 - DNA, 15 bp, Homo sapiens
atgtcctttggattt

SEQ ID NO: 1884866 - DNA, 15 bp, Homo sapiens
tgtcctttggatttc

SEQ ID NO: 1884867 - DNA, 15 bp, Homo sapiens
gtcctttggatttct

SEQ ID NO: 1884868 - DNA, 15 bp, Homo sapiens
tcctttggatttctg

SEQ ID NO: 1884869 - DNA, 15 bp, Homo sapiens
cctttggatttctgc

SEQ ID NO: 1884870 - DNA, 15 bp, Homo sapiens
ctttggatttctgca

SEQ ID NO: 1884871 - DNA, 15 bp, Homo sapiens
tttggatttctgcaa

SEQ ID NO: 1884872 - DNA, 15 bp, Homo sapiens
ttggatttctgcaat

SEQ ID NO: 1884873 - DNA, 15 bp, Homo sapiens
tggatttctgcaata

SEQ ID NO: 1884874 - DNA, 15 bp, Homo sapiens
ggatttctgcaataa

SEQ ID NO: 1884875 - DNA, 15 bp, Homo sapiens
gatttctgcaataat

SEQ ID NO: 1884876 - DNA, 15 bp, Homo sapiens
atttctgcaataatt

SEQ ID NO: 1884877 - DNA, 15 bp, Homo sapiens
tttctgcaataattg

SEQ ID NO: 1884878 - DNA, 15 bp, Homo sapiens
ttctgcaataattgc

SEQ ID NO: 1884879 - DNA, 15 bp, Homo sapiens
tctgcaataattgct

SEQ ID NO: 1884880 - DNA, 15 bp, Homo sapiens
ctgcaataattgctc

SEQ ID NO: 1884881 - DNA, 15 bp, Homo sapiens
tgcaataattgctca

SEQ ID NO: 1884882 - DNA, 15 bp, Homo sapiens
gcaataattgctcac

SEQ ID NO: 1884883 - DNA, 15 bp, Homo sapiens
caataattgctcact

SEQ ID NO: 1884884 - DNA, 15 bp, Homo sapiens
aataattgctcactt

SEQ ID NO: 1884885 - DNA, 15 bp, Homo sapiens
ataattgctcacttt

SEQ ID NO: 1884886 - DNA, 15 bp, Homo sapiens
taattgctcactttt

SEQ ID NO: 1884887 - DNA, 15 bp, Homo sapiens
aattgctcacttttt

SEQ ID NO: 1884888 - DNA, 15 bp, Homo sapiens
attgctcactttttt

SEQ ID NO: 1884889 - DNA, 15 bp, Homo sapiens
ttgctcacttttttg

SEQ ID NO: 1884890 - DNA, 15 bp, Homo sapiens
tgctcacttttttgt

SEQ ID NO: 1884891 - DNA, 15 bp, Homo sapiens
gctcacttttttgta

SEQ ID NO: 1884892 - DNA, 15 bp, Homo sapiens
ctcacttttttgtac

SEQ ID NO: 1884893 - DNA, 15 bp, Homo sapiens
tcacttttttgtaca

SEQ ID NO: 1884894 - DNA, 15 bp, Homo sapiens
cacttttttgtacat

SEQ ID NO: 1884895 - DNA, 15 bp, Homo sapiens
acttttttgtacata

SEQ ID NO: 1884896 - DNA, 15 bp, Homo sapiens
cttttttgtacatat

SEQ ID NO: 1884897 - DNA, 15 bp, Homo sapiens
ttttttgtacatatg

SEQ ID NO: 1884898 - DNA, 15 bp, Homo sapiens
tttttgtacatatgt

SEQ ID NO: 1884899 - DNA, 15 bp, Homo sapiens
ttttgtacatatgtt

SEQ ID NO: 1884900 - DNA, 15 bp, Homo sapiens
tttgtacatatgttg

SEQ ID NO: 1884901 - DNA, 15 bp, Homo sapiens
ttgtacatatgttgt

SEQ ID NO: 1884902 - DNA, 15 bp, Homo sapiens
tgtacatatgttgtt

SEQ ID NO: 1884903 - DNA, 15 bp, Homo sapiens
gtacatatgttgttg

SEQ ID NO: 1884904 - DNA, 15 bp, Homo sapiens
tacatatgttgttgg

SEQ ID NO: 1884905 - DNA, 15 bp, Homo sapiens
acatatgttgttgga

SEQ ID NO: 1884906 - DNA, 15 bp, Homo sapiens
catatgttgttggat

SEQ ID NO: 1884907 - DNA, 15 bp, Homo sapiens
atatgttgttggatg

SEQ ID NO: 1884908 - DNA, 15 bp, Homo sapiens
tatgttgttggatgt

SEQ ID NO: 1884909 - DNA, 15 bp, Homo sapiens
atgttgttggatgtg

SEQ ID NO: 1884910 - DNA, 15 bp, Homo sapiens
tgttgttggatgtgg

SEQ ID NO: 1884911 - DNA, 15 bp, Homo sapiens
gttgttggatgtggt

SEQ ID NO: 1884912 - DNA, 15 bp, Homo sapiens
ttgttggatgtggtt

SEQ ID NO: 1884913 - DNA, 15 bp, Homo sapiens
tgttggatgtggttt

SEQ ID NO: 1884914 - DNA, 15 bp, Homo sapiens
gttggatgtggtttt

SEQ ID NO: 1884915 - DNA, 15 bp, Homo sapiens
ttggatgtggttttt

SEQ ID NO: 1884916 - DNA, 15 bp, Homo sapiens
tggatgtggtttttg

SEQ ID NO: 1884917 - DNA, 15 bp, Homo sapiens
ggatgtggtttttgc

SEQ ID NO: 1884918 - DNA, 15 bp, Homo sapiens
gatgtggtttttgct

SEQ ID NO: 1884919 - DNA, 15 bp, Homo sapiens
atgtggtttttgctg

SEQ ID NO: 1884920 - DNA, 15 bp, Homo sapiens
tgtggtttttgctgg

SEQ ID NO: 1884921 - DNA, 15 bp, Homo sapiens
gtggtttttgctggt

SEQ ID NO: 1884922 - DNA, 15 bp, Homo sapiens
tggtttttgctggtt

SEQ ID NO: 1884923 - DNA, 15 bp, Homo sapiens
ggtttttgctggttg

SEQ ID NO: 1884924 - DNA, 15 bp, Homo sapiens
gtttttgctggttgc

SEQ ID NO: 1884925 - DNA, 15 bp, Homo sapiens
tttttgctggttgca

SEQ ID NO: 1884926 - DNA, 15 bp, Homo sapiens
ttttgctggttgcac

SEQ ID NO: 1884927 - DNA, 15 bp, Homo sapiens
tttgctggttgcaca

SEQ ID NO: 1884928 - DNA, 15 bp, Homo sapiens
ttgctggttgcacac

SEQ ID NO: 1884929 - DNA, 15 bp, Homo sapiens
tgctggttgcacacg

SEQ ID NO: 1884930 - DNA, 15 bp, Homo sapiens
gctggttgcacacgc

SEQ ID NO: 1884931 - DNA, 15 bp, Homo sapiens
ctggttgcacacgca

SEQ ID NO: 1884932 - DNA, 15 bp, Homo sapiens
tggttgcacacgcac

SEQ ID NO: 1884933 - DNA, 15 bp, Homo sapiens
ggttgcacacgcaca

SEQ ID NO: 1884934 - DNA, 15 bp, Homo sapiens
gttgcacacgcacat

SEQ ID NO: 1884935 - DNA, 15 bp, Homo sapiens
ttgcacacgcacata

SEQ ID NO: 1884936 - DNA, 15 bp, Homo sapiens
tgcacacgcacatag

SEQ ID NO: 1884937 - DNA, 15 bp, Homo sapiens
gcacacgcacataga

SEQ ID NO: 1884938 - DNA, 15 bp, Homo sapiens
cacacgcacatagat

SEQ ID NO: 1884939 - DNA, 15 bp, Homo sapiens
acacgcacatagatg

SEQ ID NO: 1884940 - DNA, 15 bp, Homo sapiens
cacgcacatagatgt

SEQ ID NO: 1884941 - DNA, 15 bp, Homo sapiens
acgcacatagatgtt

SEQ ID NO: 1884942 - DNA, 15 bp, Homo sapiens
cgcacatagatgttt

SEQ ID NO: 1884943 - DNA, 15 bp, Homo sapiens
gcacatagatgtttt

SEQ ID NO: 1884944 - DNA, 15 bp, Homo sapiens
cacatagatgttttg

SEQ ID NO: 1884945 - DNA, 15 bp, Homo sapiens
acatagatgttttga

SEQ ID NO: 1884946 - DNA, 15 bp, Homo sapiens
catagatgttttgaa

SEQ ID NO: 1884947 - DNA, 15 bp, Homo sapiens
atagatgttttgaat

SEQ ID NO: 1884948 - DNA, 15 bp, Homo sapiens
tagatgttttgaata

SEQ ID NO: 1884949 - DNA, 15 bp, Homo sapiens
agatgttttgaatac

SEQ ID NO: 1884950 - DNA, 15 bp, Homo sapiens
gatgttttgaatact

SEQ ID NO: 1884951 - DNA, 15 bp, Homo sapiens
atgttttgaatacta

SEQ ID NO: 1884952 - DNA, 15 bp, Homo sapiens
tgttttgaatactat

SEQ ID NO: 1884953 - DNA, 15 bp, Homo sapiens
gttttgaatactatt

SEQ ID NO: 1884954 - DNA, 15 bp, Homo sapiens
ttttgaatactatta

SEQ ID NO: 1884955 - DNA, 15 bp, Homo sapiens
tttgaatactattaa

SEQ ID NO: 1884956 - DNA, 15 bp, Homo sapiens
ttgaatactattaac

SEQ ID NO: 1884957 - DNA, 15 bp, Homo sapiens
tgaatactattaact

SEQ ID NO: 1884958 - DNA, 15 bp, Homo sapiens
gaatactattaactg

SEQ ID NO: 1884959 - DNA, 15 bp, Homo sapiens
aatactattaactga

SEQ ID NO: 1884960 - DNA, 15 bp, Homo sapiens
atactattaactgat

SEQ ID NO: 1884961 - DNA, 15 bp, Homo sapiens
tactattaactgatt

SEQ ID NO: 1884962 - DNA, 15 bp, Homo sapiens
actattaactgattt

SEQ ID NO: 1884963 - DNA, 15 bp, Homo sapiens
ctattaactgatttt

SEQ ID NO: 1884964 - DNA, 15 bp, Homo sapiens
tattaactgattttt

SEQ ID NO: 1884965 - DNA, 15 bp, Homo sapiens
attaactgatttttt

SEQ ID NO: 1884966 - DNA, 15 bp, Homo sapiens
ttaactgattttttt

SEQ ID NO: 1884967 - DNA, 15 bp, Homo sapiens
taactgattttttta

SEQ ID NO: 1884968 - DNA, 15 bp, Homo sapiens
aactgatttttttat

SEQ ID NO: 1884969 - DNA, 15 bp, Homo sapiens
actgatttttttata

SEQ ID NO: 1884970 - DNA, 15 bp, Homo sapiens
ctgatttttttataa

SEQ ID NO: 1884971 - DNA, 15 bp, Homo sapiens
tgatttttttataat

SEQ ID NO: 1884972 - DNA, 15 bp, Homo sapiens
gatttttttataata

SEQ ID NO: 1884973 - DNA, 15 bp, Homo sapiens
atttttttataataa

SEQ ID NO: 1884974 - DNA, 15 bp, Homo sapiens
tttttttataataaa

SEQ ID NO: 1884975 - DNA, 15 bp, Homo sapiens
ttttttataataaaa

SEQ ID NO: 1884976 - DNA, 15 bp, Homo sapiens
tttttataataaaat

SEQ ID NO: 1884977 - DNA, 15 bp, Homo sapiens
ttttataataaaatc

SEQ ID NO: 1884978 - DNA, 15 bp, Homo sapiens
tttataataaaatct

SEQ ID NO: 1884979 - DNA, 15 bp, Homo sapiens
ttataataaaatctt

SEQ ID NO: 1884980 - DNA, 15 bp, Homo sapiens
tataataaaatctta

SEQ ID NO: 1884981 - DNA, 15 bp, Homo sapiens
ataataaaatcttat

SEQ ID NO: 1884982 - DNA, 15 bp, Homo sapiens
taataaaatcttatt

SEQ ID NO: 1884983 - DNA, 15 bp, Homo sapiens
aataaaatcttattc

SEQ ID NO: 1884984 - DNA, 15 bp, Homo sapiens
ataaaatcttattca

SEQ ID NO: 1884985 - DNA, 15 bp, Homo sapiens
taaaatcttattcat

SEQ ID NO: 1884986 - DNA, 15 bp, Homo sapiens
aaaatcttattcatc

SEQ ID NO: 1884987 - DNA, 15 bp, Homo sapiens
aaatcttattcatcc

SEQ ID NO: 1884988 - DNA, 15 bp, Homo sapiens
aatcttattcatcca

SEQ ID NO: 1884989 - DNA, 15 bp, Homo sapiens
atcttattcatccaa

SEQ ID NO: 1884990 - DNA, 15 bp, Homo sapiens
tcttattcatccaaa

SEQ ID NO: 1884991 - DNA, 15 bp, Homo sapiens
cttattcatccaaaa

SEQ ID NO: 1884992 - DNA, 15 bp, Homo sapiens
ttattcatccaaaat

SEQ ID NO: 1884993 - DNA, 15 bp, Homo sapiens
tattcatccaaaatc

SEQ ID NO: 1884994 - DNA, 15 bp, Homo sapiens
attcatccaaaatct

SEQ ID NO: 1884995 - DNA, 15 bp, Homo sapiens
ttcatccaaaatcta

SEQ ID NO: 1884996 - DNA, 15 bp, Homo sapiens
tcatccaaaatctag

SEQ ID NO: 1884997 - DNA, 15 bp, Homo sapiens
catccaaaatctagt

SEQ ID NO: 1884998 - DNA, 15 bp, Homo sapiens
atccaaaatctagta

SEQ ID NO: 1884999 - DNA, 15 bp, Homo sapiens
tccaaaatctagtat

SEQ ID NO: 1885000 - DNA, 15 bp, Homo sapiens
ccaaaatctagtatt

SEQ ID NO: 1885001 - DNA, 15 bp, Homo sapiens
caaaatctagtattc

SEQ ID NO: 1885002 - DNA, 15 bp, Homo sapiens
aaaatctagtattct

SEQ ID NO: 1885003 - DNA, 15 bp, Homo sapiens
aaatctagtattctg

SEQ ID NO: 1885004 - DNA, 15 bp, Homo sapiens
aatctagtattctga

SEQ ID NO: 1885005 - DNA, 15 bp, Homo sapiens
atctagtattctgaa

SEQ ID NO: 1885006 - DNA, 15 bp, Homo sapiens
tctagtattctgaat

SEQ ID NO: 1885007 - DNA, 15 bp, Homo sapiens
ctagtattctgaatc

SEQ ID NO: 1885008 - DNA, 15 bp, Homo sapiens
tagtattctgaatca

SEQ ID NO: 1885009 - DNA, 15 bp, Homo sapiens
agtattctgaatcag

SEQ ID NO: 1885010 - DNA, 15 bp, Homo sapiens
gtattctgaatcagt

SEQ ID NO: 1885011 - DNA, 15 bp, Homo sapiens
tattctgaatcagta

SEQ ID NO: 1885012 - DNA, 15 bp, Homo sapiens
attctgaatcagtag

SEQ ID NO: 1885013 - DNA, 15 bp, Homo sapiens
ttctgaatcagtaga

SEQ ID NO: 1885014 - DNA, 15 bp, Homo sapiens
tctgaatcagtagaa

SEQ ID NO: 1885015 - DNA, 15 bp, Homo sapiens
ctgaatcagtagaaa

SEQ ID NO: 1885016 - DNA, 15 bp, Homo sapiens
tgaatcagtagaaag

SEQ ID NO: 1885017 - DNA, 15 bp, Homo sapiens
gaatcagtagaaagt

SEQ ID NO: 1885018 - DNA, 15 bp, Homo sapiens
aatcagtagaaagtc

SEQ ID NO: 1885019 - DNA, 15 bp, Homo sapiens
atcagtagaaagtct

SEQ ID NO: 1885020 - DNA, 15 bp, Homo sapiens
tcagtagaaagtctt

SEQ ID NO: 1885021 - DNA, 15 bp, Homo sapiens
cagtagaaagtctta

SEQ ID NO: 1885022 - DNA, 15 bp, Homo sapiens
agtagaaagtcttaa

SEQ ID NO: 1885023 - DNA, 15 bp, Homo sapiens
gtagaaagtcttaat

SEQ ID NO: 1885024 - DNA, 15 bp, Homo sapiens
tagaaagtcttaatc

SEQ ID NO: 1885025 - DNA, 15 bp, Homo sapiens
agaaagtcttaatca

SEQ ID NO: 1885026 - DNA, 15 bp, Homo sapiens
gaaagtcttaatcat

SEQ ID NO: 1885027 - DNA, 15 bp, Homo sapiens
aaagtcttaatcata

SEQ ID NO: 1885028 - DNA, 15 bp, Homo sapiens
aagtcttaatcatag

SEQ ID NO: 1885029 - DNA, 15 bp, Homo sapiens
agtcttaatcataga

SEQ ID NO: 1885030 - DNA, 15 bp, Homo sapiens
gtcttaatcatagac

SEQ ID NO: 1885031 - DNA, 15 bp, Homo sapiens
tcttaatcatagact

SEQ ID NO: 1885032 - DNA, 15 bp, Homo sapiens
cttaatcatagactg

SEQ ID NO: 1885033 - DNA, 15 bp, Homo sapiens
ttaatcatagactgt

SEQ ID NO: 1885034 - DNA, 15 bp, Homo sapiens
taatcatagactgtt

SEQ ID NO: 1885035 - DNA, 15 bp, Homo sapiens
aatcatagactgttt

SEQ ID NO: 1885036 - DNA, 15 bp, Homo sapiens
atcatagactgtttt

SEQ ID NO: 1885037 - DNA, 15 bp, Homo sapiens
tcatagactgtttta

SEQ ID NO: 1885038 - DNA, 15 bp, Homo sapiens
catagactgttttaa

SEQ ID NO: 1885039 - DNA, 15 bp, Homo sapiens
atagactgttttaaa

SEQ ID NO: 1885040 - DNA, 15 bp, Homo sapiens
tagactgttttaaaa

SEQ ID NO: 1885041 - DNA, 15 bp, Homo sapiens
agactgttttaaaag

SEQ ID NO: 1885042 - DNA, 15 bp, Homo sapiens
gactgttttaaaaga

SEQ ID NO: 1885043 - DNA, 15 bp, Homo sapiens
actgttttaaaagaa

SEQ ID NO: 1885044 - DNA, 15 bp, Homo sapiens
ctgttttaaaagaat

SEQ ID NO: 1885045 - DNA, 15 bp, Homo sapiens
tgttttaaaagaatt

SEQ ID NO: 1885046 - DNA, 15 bp, Homo sapiens
gttttaaaagaattg

SEQ ID NO: 1885047 - DNA, 15 bp, Homo sapiens
ttttaaaagaattgt

SEQ ID NO: 1885048 - DNA, 15 bp, Homo sapiens
tttaaaagaattgta

SEQ ID NO: 1885049 - DNA, 15 bp, Homo sapiens
ttaaaagaattgtag

SEQ ID NO: 1885050 - DNA, 15 bp, Homo sapiens
taaaagaattgtagt

SEQ ID NO: 1885051 - DNA, 15 bp, Homo sapiens
aaaagaattgtagtt

SEQ ID NO: 1885052 - DNA, 15 bp, Homo sapiens
aaagaattgtagttt

SEQ ID NO: 1885053 - DNA, 15 bp, Homo sapiens
aagaattgtagttta

SEQ ID NO: 1885054 - DNA, 15 bp, Homo sapiens
agaattgtagtttat

SEQ ID NO: 1885055 - DNA, 15 bp, Homo sapiens
gaattgtagtttatt

SEQ ID NO: 1885056 - DNA, 15 bp, Homo sapiens
aattgtagtttatta

SEQ ID NO: 1885057 - DNA, 15 bp, Homo sapiens
attgtagtttattag

SEQ ID NO: 1885058 - DNA, 15 bp, Homo sapiens
ttgtagtttattagt

SEQ ID NO: 1885059 - DNA, 15 bp, Homo sapiens
tgtagtttattagtc

SEQ ID NO: 1885060 - DNA, 15 bp, Homo sapiens
gtagtttattagtca

SEQ ID NO: 1885061 - DNA, 15 bp, Homo sapiens
tagtttattagtcat

SEQ ID NO: 1885062 - DNA, 15 bp, Homo sapiens
agtttattagtcata

SEQ ID NO: 1885063 - DNA, 15 bp, Homo sapiens
gtttattagtcatat

SEQ ID NO: 1885064 - DNA, 15 bp, Homo sapiens
tttattagtcatatg

SEQ ID NO: 1885065 - DNA, 15 bp, Homo sapiens
ttattagtcatatgc

SEQ ID NO: 1885066 - DNA, 15 bp, Homo sapiens
tattagtcatatgct

SEQ ID NO: 1885067 - DNA, 15 bp, Homo sapiens
attagtcatatgctt

SEQ ID NO: 1885068 - DNA, 15 bp, Homo sapiens
ttagtcatatgctta

SEQ ID NO: 1885069 - DNA, 15 bp, Homo sapiens
tagtcatatgcttac

SEQ ID NO: 1885070 - DNA, 15 bp, Homo sapiens
agtcatatgcttacc

SEQ ID NO: 1885071 - DNA, 15 bp, Homo sapiens
gtcatatgcttacca

SEQ ID NO: 1885072 - DNA, 15 bp, Homo sapiens
tcatatgcttaccat

SEQ ID NO: 1885073 - DNA, 15 bp, Homo sapiens
catatgcttaccatt

SEQ ID NO: 1885074 - DNA, 15 bp, Homo sapiens
atatgcttaccatta

SEQ ID NO: 1885075 - DNA, 15 bp, Homo sapiens
tatgcttaccattat

SEQ ID NO: 1885076 - DNA, 15 bp, Homo sapiens
atgcttaccattata

SEQ ID NO: 1885077 - DNA, 15 bp, Homo sapiens
tgcttaccattataa

SEQ ID NO: 1885078 - DNA, 15 bp, Homo sapiens
gcttaccattataac

SEQ ID NO: 1885079 - DNA, 15 bp, Homo sapiens
cttaccattataaca

SEQ ID NO: 1885080 - DNA, 15 bp, Homo sapiens
ttaccattataacac

SEQ ID NO: 1885081 - DNA, 15 bp, Homo sapiens
taccattataacaca

SEQ ID NO: 1885082 - DNA, 15 bp, Homo sapiens
accattataacacag

SEQ ID NO: 1885083 - DNA, 15 bp, Homo sapiens
ccattataacacagt

SEQ ID NO: 1885084 - DNA, 15 bp, Homo sapiens
cattataacacagtc

SEQ ID NO: 1885085 - DNA, 15 bp, Homo sapiens
attataacacagtct

SEQ ID NO: 1885086 - DNA, 15 bp, Homo sapiens
ttataacacagtctt

SEQ ID NO: 1885087 - DNA, 15 bp, Homo sapiens
tataacacagtctta

SEQ ID NO: 1885088 - DNA, 15 bp, Homo sapiens
ataacacagtcttaa

SEQ ID NO: 1885089 - DNA, 15 bp, Homo sapiens
taacacagtcttaaa

SEQ ID NO: 1885090 - DNA, 15 bp, Homo sapiens
aacacagtcttaaag

SEQ ID NO: 1885091 - DNA, 15 bp, Homo sapiens
acacagtcttaaagt

SEQ ID NO: 1885092 - DNA, 15 bp, Homo sapiens
cacagtcttaaagtt

SEQ ID NO: 1885093 - DNA, 15 bp, Homo sapiens
acagtcttaaagtta

SEQ ID NO: 1885094 - DNA, 15 bp, Homo sapiens
cagtcttaaagttaa

SEQ ID NO: 1885095 - DNA, 15 bp, Homo sapiens
agtcttaaagttaat

SEQ ID NO: 1885096 - DNA, 15 bp, Homo sapiens
gtcttaaagttaatg

SEQ ID NO: 1885097 - DNA, 15 bp, Homo sapiens
tcttaaagttaatgc

SEQ ID NO: 1885098 - DNA, 15 bp, Homo sapiens
cttaaagttaatgct

SEQ ID NO: 1885099 - DNA, 15 bp, Homo sapiens
ttaaagttaatgctt

SEQ ID NO: 1885100 - DNA, 15 bp, Homo sapiens
taaagttaatgcttg

SEQ ID NO: 1885101 - DNA, 15 bp, Homo sapiens
aaagttaatgcttgg

SEQ ID NO: 1885102 - DNA, 15 bp, Homo sapiens
aagttaatgcttggc

SEQ ID NO: 1885103 - DNA, 15 bp, Homo sapiens
agttaatgcttggct

SEQ ID NO: 1885104 - DNA, 15 bp, Homo sapiens
gttaatgcttggctt

SEQ ID NO: 1885105 - DNA, 15 bp, Homo sapiens
ttaatgcttggcttt

SEQ ID NO: 1885106 - DNA, 15 bp, Homo sapiens
taatgcttggctttt

SEQ ID NO: 1885107 - DNA, 15 bp, Homo sapiens
aatgcttggcttttc

SEQ ID NO: 1885108 - DNA, 15 bp, Homo sapiens
atgcttggcttttct

SEQ ID NO: 1885109 - DNA, 15 bp, Homo sapiens
tgcttggcttttcta

SEQ ID NO: 1885110 - DNA, 15 bp, Homo sapiens
gcttggcttttctaa

SEQ ID NO: 1885111 - DNA, 15 bp, Homo sapiens
cttggcttttctaag

SEQ ID NO: 1885112 - DNA, 15 bp, Homo sapiens
ttggcttttctaagt

SEQ ID NO: 1885113 - DNA, 15 bp, Homo sapiens
tggcttttctaagtt

SEQ ID NO: 1885114 - DNA, 15 bp, Homo sapiens
ggcttttctaagtta

SEQ ID NO: 1885115 - DNA, 15 bp, Homo sapiens
gcttttctaagttaa

SEQ ID NO: 1885116 - DNA, 15 bp, Homo sapiens
cttttctaagttaaa

SEQ ID NO: 1885117 - DNA, 15 bp, Homo sapiens
ttttctaagttaaag

SEQ ID NO: 1885118 - DNA, 15 bp, Homo sapiens
tttctaagttaaagt

SEQ ID NO: 1885119 - DNA, 15 bp, Homo sapiens
ttctaagttaaagtc

SEQ ID NO: 1885120 - DNA, 15 bp, Homo sapiens
tctaagttaaagtcc

SEQ ID NO: 1885121 - DNA, 15 bp, Homo sapiens
ctaagttaaagtcct

SEQ ID NO: 1885122 - DNA, 15 bp, Homo sapiens
taagttaaagtcctt

SEQ ID NO: 1885123 - DNA, 15 bp, Homo sapiens
aagttaaagtccttt

SEQ ID NO: 1885124 - DNA, 15 bp, Homo sapiens
agttaaagtcctttt

SEQ ID NO: 1885125 - DNA, 15 bp, Homo sapiens
gttaaagtccttttg

SEQ ID NO: 1885126 - DNA, 15 bp, Homo sapiens
ttaaagtccttttgt

SEQ ID NO: 1885127 - DNA, 15 bp, Homo sapiens
taaagtccttttgtt

SEQ ID NO: 1885128 - DNA, 15 bp, Homo sapiens
aaagtccttttgttc

SEQ ID NO: 1885129 - DNA, 15 bp, Homo sapiens
aagtccttttgttct

SEQ ID NO: 1885130 - DNA, 15 bp, Homo sapiens
agtccttttgttcta

SEQ ID NO: 1885131 - DNA, 15 bp, Homo sapiens
gtccttttgttctaa

SEQ ID NO: 1885132 - DNA, 15 bp, Homo sapiens
tccttttgttctaaa

SEQ ID NO: 1885133 - DNA, 15 bp, Homo sapiens
ccttttgttctaaat

SEQ ID NO: 1885134 - DNA, 15 bp, Homo sapiens
cttttgttctaaatt

SEQ ID NO: 1885135 - DNA, 15 bp, Homo sapiens
ttttgttctaaattt

SEQ ID NO: 1885136 - DNA, 15 bp, Homo sapiens
tttgttctaaatttc

SEQ ID NO: 1885137 - DNA, 15 bp, Homo sapiens
ttgttctaaatttct

SEQ ID NO: 1885138 - DNA, 15 bp, Homo sapiens
tgttctaaatttctg

SEQ ID NO: 1885139 - DNA, 15 bp, Homo sapiens
gttctaaatttctgt

SEQ ID NO: 1885140 - DNA, 15 bp, Homo sapiens
ttctaaatttctgtg

SEQ ID NO: 1885141 - DNA, 15 bp, Homo sapiens
tctaaatttctgtgg

SEQ ID NO: 1885142 - DNA, 15 bp, Homo sapiens
ctaaatttctgtggt

SEQ ID NO: 1885143 - DNA, 15 bp, Homo sapiens
taaatttctgtggtc

SEQ ID NO: 1885144 - DNA, 15 bp, Homo sapiens
aaatttctgtggtcc

SEQ ID NO: 1885145 - DNA, 15 bp, Homo sapiens
aatttctgtggtcct

SEQ ID NO: 1885146 - DNA, 15 bp, Homo sapiens
atttctgtggtcctg

SEQ ID NO: 1885147 - DNA, 15 bp, Homo sapiens
tttctgtggtcctgg

SEQ ID NO: 1885148 - DNA, 15 bp, Homo sapiens
ttctgtggtcctggt

SEQ ID NO: 1885149 - DNA, 15 bp, Homo sapiens
tctgtggtcctggta

SEQ ID NO: 1885150 - DNA, 15 bp, Homo sapiens
ctgtggtcctggtat

SEQ ID NO: 1885151 - DNA, 15 bp, Homo sapiens
tgtggtcctggtata

SEQ ID NO: 1885152 - DNA, 15 bp, Homo sapiens
gtggtcctggtataa

SEQ ID NO: 1885153 - DNA, 15 bp, Homo sapiens
tggtcctggtataat

SEQ ID NO: 1885154 - DNA, 15 bp, Homo sapiens
ggtcctggtataata

SEQ ID NO: 1885155 - DNA, 15 bp, Homo sapiens
gtcctggtataataa

SEQ ID NO: 1885156 - DNA, 15 bp, Homo sapiens
tcctggtataataaa

SEQ ID NO: 1885157 - DNA, 15 bp, Homo sapiens
cctggtataataaag

SEQ ID NO: 1885158 - DNA, 15 bp, Homo sapiens
ctggtataataaaga

SEQ ID NO: 1885159 - DNA, 15 bp, Homo sapiens
tggtataataaagag

SEQ ID NO: 1885160 - DNA, 15 bp, Homo sapiens
ggtataataaagagg

SEQ ID NO: 1885161 - DNA, 15 bp, Homo sapiens
gtataataaagaggt

SEQ ID NO: 1885162 - DNA, 15 bp, Homo sapiens
tataataaagaggta

SEQ ID NO: 1885163 - DNA, 15 bp, Homo sapiens
ataataaagaggtat

SEQ ID NO: 1885164 - DNA, 15 bp, Homo sapiens
taataaagaggtatg

SEQ ID NO: 1885165 - DNA, 15 bp, Homo sapiens
aataaagaggtatga

SEQ ID NO: 1885166 - DNA, 15 bp, Homo sapiens
ataaagaggtatgac

SEQ ID NO: 1885167 - DNA, 15 bp, Homo sapiens
taaagaggtatgacc

SEQ ID NO: 1885168 - DNA, 15 bp, Homo sapiens
aaagaggtatgacct

SEQ ID NO: 1885169 - DNA, 15 bp, Homo sapiens
aagaggtatgaccta

SEQ ID NO: 1885170 - DNA, 15 bp, Homo sapiens
agaggtatgacctat

SEQ ID NO: 1885171 - DNA, 15 bp, Homo sapiens
gaggtatgacctatt

SEQ ID NO: 1885172 - DNA, 15 bp, Homo sapiens
aggtatgacctatta

SEQ ID NO: 1885173 - DNA, 15 bp, Homo sapiens
ggtatgacctattag

SEQ ID NO: 1885174 - DNA, 15 bp, Homo sapiens
gtatgacctattagg

SEQ ID NO: 1885175 - DNA, 15 bp, Homo sapiens
tatgacctattagga

SEQ ID NO: 1885176 - DNA, 15 bp, Homo sapiens
atgacctattaggat

SEQ ID NO: 1885177 - DNA, 15 bp, Homo sapiens
tgacctattaggatg

SEQ ID NO: 1885178 - DNA, 15 bp, Homo sapiens
gacctattaggatgt

SEQ ID NO: 1885179 - DNA, 15 bp, Homo sapiens
acctattaggatgtg

SEQ ID NO: 1885180 - DNA, 15 bp, Homo sapiens
cctattaggatgtgc

SEQ ID NO: 1885181 - DNA, 15 bp, Homo sapiens
ctattaggatgtgct

SEQ ID NO: 1885182 - DNA, 15 bp, Homo sapiens
tattaggatgtgcta

SEQ ID NO: 1885183 - DNA, 15 bp, Homo sapiens
attaggatgtgctaa

SEQ ID NO: 1885184 - DNA, 15 bp, Homo sapiens
ttaggatgtgctaac

SEQ ID NO: 1885185 - DNA, 15 bp, Homo sapiens
taggatgtgctaaca

SEQ ID NO: 1885186 - DNA, 15 bp, Homo sapiens
aggatgtgctaacat

SEQ ID NO: 1885187 - DNA, 15 bp, Homo sapiens
ggatgtgctaacatg

SEQ ID NO: 1885188 - DNA, 15 bp, Homo sapiens
gatgtgctaacatga

SEQ ID NO: 1885189 - DNA, 15 bp, Homo sapiens
atgtgctaacatgat

SEQ ID NO: 1885190 - DNA, 15 bp, Homo sapiens
tgtgctaacatgatg

SEQ ID NO: 1885191 - DNA, 15 bp, Homo sapiens
gtgctaacatgatga

SEQ ID NO: 1885192 - DNA, 15 bp, Homo sapiens
tgctaacatgatgat

SEQ ID NO: 1885193 - DNA, 15 bp, Homo sapiens
gctaacatgatgata

SEQ ID NO: 1885194 - DNA, 15 bp, Homo sapiens
ctaacatgatgatat

SEQ ID NO: 1885195 - DNA, 15 bp, Homo sapiens
taacatgatgatatt

SEQ ID NO: 1885196 - DNA, 15 bp, Homo sapiens
aacatgatgatatta

SEQ ID NO: 1885197 - DNA, 15 bp, Homo sapiens
acatgatgatattag

SEQ ID NO: 1885198 - DNA, 15 bp, Homo sapiens
catgatgatattagt

SEQ ID NO: 1885199 - DNA, 15 bp, Homo sapiens
atgatgatattagta

SEQ ID NO: 1885200 - DNA, 15 bp, Homo sapiens
tgatgatattagtat

SEQ ID NO: 1885201 - DNA, 15 bp, Homo sapiens
gatgatattagtatg

SEQ ID NO: 1885202 - DNA, 15 bp, Homo sapiens
atgatattagtatga

SEQ ID NO: 1885203 - DNA, 15 bp, Homo sapiens
tgatattagtatgat

SEQ ID NO: 1885204 - DNA, 15 bp, Homo sapiens
gatattagtatgatg

SEQ ID NO: 1885205 - DNA, 15 bp, Homo sapiens
atattagtatgatga

SEQ ID NO: 1885206 - DNA, 15 bp, Homo sapiens
tattagtatgatgat

SEQ ID NO: 1885207 - DNA, 15 bp, Homo sapiens
attagtatgatgatt

SEQ ID NO: 1885208 - DNA, 15 bp, Homo sapiens
ttagtatgatgatta

SEQ ID NO: 1885209 - DNA, 15 bp, Homo sapiens
tagtatgatgattag

SEQ ID NO: 1885210 - DNA, 15 bp, Homo sapiens
agtatgatgattagt

SEQ ID NO: 1885211 - DNA, 15 bp, Homo sapiens
gtatgatgattagta

SEQ ID NO: 1885212 - DNA, 15 bp, Homo sapiens
tatgatgattagtat

SEQ ID NO: 1885213 - DNA, 15 bp, Homo sapiens
atgatgattagtata

SEQ ID NO: 1885214 - DNA, 15 bp, Homo sapiens
tgatgattagtatat

SEQ ID NO: 1885215 - DNA, 15 bp, Homo sapiens
gatgattagtatatg

SEQ ID NO: 1885216 - DNA, 15 bp, Homo sapiens
atgattagtatatgt

SEQ ID NO: 1885217 - DNA, 15 bp, Homo sapiens
tgattagtatatgta

SEQ ID NO: 1885218 - DNA, 15 bp, Homo sapiens
gattagtatatgtat

SEQ ID NO: 1885219 - DNA, 15 bp, Homo sapiens
attagtatatgtatc

SEQ ID NO: 1885220 - DNA, 15 bp, Homo sapiens
ttagtatatgtatct

SEQ ID NO: 1885221 - DNA, 15 bp, Homo sapiens
tagtatatgtatctg

SEQ ID NO: 1885222 - DNA, 15 bp, Homo sapiens
agtatatgtatctgt

SEQ ID NO: 1885223 - DNA, 15 bp, Homo sapiens
gtatatgtatctgtg

SEQ ID NO: 1885224 - DNA, 15 bp, Homo sapiens
tatatgtatctgtgc

SEQ ID NO: 1885225 - DNA, 15 bp, Homo sapiens
atatgtatctgtgca

SEQ ID NO: 1885226 - DNA, 15 bp, Homo sapiens
tatgtatctgtgcaa

SEQ ID NO: 1885227 - DNA, 15 bp, Homo sapiens
atgtatctgtgcaag

SEQ ID NO: 1885228 - DNA, 15 bp, Homo sapiens
tgtatctgtgcaagt

SEQ ID NO: 1885229 - DNA, 15 bp, Homo sapiens
gtatctgtgcaagta

SEQ ID NO: 1885230 - DNA, 15 bp, Homo sapiens
tatctgtgcaagtaa

SEQ ID NO: 1885231 - DNA, 15 bp, Homo sapiens
atctgtgcaagtaaa

SEQ ID NO: 1885232 - DNA, 15 bp, Homo sapiens
tctgtgcaagtaaat

SEQ ID NO: 1885233 - DNA, 15 bp, Homo sapiens
ctgtgcaagtaaatg

SEQ ID NO: 1885234 - DNA, 15 bp, Homo sapiens
tgtgcaagtaaatga

SEQ ID NO: 1885235 - DNA, 15 bp, Homo sapiens
gtgcaagtaaatgat

SEQ ID NO: 1885236 - DNA, 15 bp, Homo sapiens
tgcaagtaaatgata

SEQ ID NO: 1885237 - DNA, 15 bp, Homo sapiens
gcaagtaaatgatat

SEQ ID NO: 1885238 - DNA, 15 bp, Homo sapiens
caagtaaatgatatt

SEQ ID NO: 1885239 - DNA, 15 bp, Homo sapiens
aagtaaatgatatta

SEQ ID NO: 1885240 - DNA, 15 bp, Homo sapiens
agtaaatgatattaa

SEQ ID NO: 1885241 - DNA, 15 bp, Homo sapiens
gtaaatgatattaaa

SEQ ID NO: 1885242 - DNA, 15 bp, Homo sapiens
taaatgatattaaaa

SEQ ID NO: 1885243 - DNA, 15 bp, Homo sapiens
aaatgatattaaaat

SEQ ID NO: 1885244 - DNA, 15 bp, Homo sapiens
aatgatattaaaatg

SEQ ID NO: 1885245 - DNA, 15 bp, Homo sapiens
atgatattaaaatgc

SEQ ID NO: 1885246 - DNA, 15 bp, Homo sapiens
tgatattaaaatgct

SEQ ID NO: 1885247 - DNA, 15 bp, Homo sapiens
gatattaaaatgctt

SEQ ID NO: 1885248 - DNA, 15 bp, Homo sapiens
atattaaaatgcttt

SEQ ID NO: 1885249 - DNA, 15 bp, Homo sapiens
tattaaaatgctttg

SEQ ID NO: 1885250 - DNA, 15 bp, Homo sapiens
attaaaatgctttga

SEQ ID NO: 1885251 - DNA, 15 bp, Homo sapiens
ttaaaatgctttgag

SEQ ID NO: 1885252 - DNA, 15 bp, Homo sapiens
taaaatgctttgaga

SEQ ID NO: 1885253 - DNA, 15 bp, Homo sapiens
aaaatgctttgagac

SEQ ID NO: 1885254 - DNA, 15 bp, Homo sapiens
aaatgctttgagaca

SEQ ID NO: 1885255 - DNA, 15 bp, Homo sapiens
aatgctttgagacaa

SEQ ID NO: 1885256 - DNA, 15 bp, Homo sapiens
atgctttgagacaat

SEQ ID NO: 1885257 - DNA, 15 bp, Homo sapiens
tgctttgagacaatt

SEQ ID NO: 1885258 - DNA, 15 bp, Homo sapiens
gctttgagacaattt

SEQ ID NO: 1885259 - DNA, 15 bp, Homo sapiens
ctttgagacaatttc

SEQ ID NO: 1885260 - DNA, 15 bp, Homo sapiens
tttgagacaatttct

SEQ ID NO: 1885261 - DNA, 15 bp, Homo sapiens
ttgagacaatttctt

SEQ ID NO: 1885262 - DNA, 15 bp, Homo sapiens
tgagacaatttcttt

SEQ ID NO: 1885263 - DNA, 15 bp, Homo sapiens
gagacaatttctttt

SEQ ID NO: 1885264 - DNA, 15 bp, Homo sapiens
agacaatttctttta

SEQ ID NO: 1885265 - DNA, 15 bp, Homo sapiens
gacaatttcttttaa

SEQ ID NO: 1885266 - DNA, 15 bp, Homo sapiens
acaatttcttttaat

SEQ ID NO: 1885267 - DNA, 15 bp, Homo sapiens
caatttcttttaatt

SEQ ID NO: 1885268 - DNA, 15 bp, Homo sapiens
aatttcttttaattg

SEQ ID NO: 1885269 - DNA, 15 bp, Homo sapiens
atttcttttaattgc

SEQ ID NO: 1885270 - DNA, 15 bp, Homo sapiens
tttcttttaattgca

SEQ ID NO: 1885271 - DNA, 15 bp, Homo sapiens
ttcttttaattgcat

SEQ ID NO: 1885272 - DNA, 15 bp, Homo sapiens
tcttttaattgcatt

SEQ ID NO: 1885273 - DNA, 15 bp, Homo sapiens
cttttaattgcattt

SEQ ID NO: 1885274 - DNA, 15 bp, Homo sapiens
ttttaattgcatttc

SEQ ID NO: 1885275 - DNA, 15 bp, Homo sapiens
tttaattgcatttct

SEQ ID NO: 1885276 - DNA, 15 bp, Homo sapiens
ttaattgcatttctt

SEQ ID NO: 1885277 - DNA, 15 bp, Homo sapiens
taattgcatttcttc

SEQ ID NO: 1885278 - DNA, 15 bp, Homo sapiens
aattgcatttcttcc

SEQ ID NO: 1885279 - DNA, 15 bp, Homo sapiens
attgcatttcttcct

SEQ ID NO: 1885280 - DNA, 15 bp, Homo sapiens
ttgcatttcttccta

SEQ ID NO: 1885281 - DNA, 15 bp, Homo sapiens
tgcatttcttcctac

SEQ ID NO: 1885282 - DNA, 15 bp, Homo sapiens
gcatttcttcctaca

SEQ ID NO: 1885283 - DNA, 15 bp, Homo sapiens
catttcttcctacaa

SEQ ID NO: 1885284 - DNA, 15 bp, Homo sapiens
atttcttcctacaat

SEQ ID NO: 1885285 - DNA, 15 bp, Homo sapiens
tttcttcctacaata

SEQ ID NO: 1885286 - DNA, 15 bp, Homo sapiens
ttcttcctacaatat

SEQ ID NO: 1885287 - DNA, 15 bp, Homo sapiens
tcttcctacaatatg

SEQ ID NO: 1885288 - DNA, 15 bp, Homo sapiens
cttcctacaatatgg

SEQ ID NO: 1885289 - DNA, 15 bp, Homo sapiens
ttcctacaatatggt

SEQ ID NO: 1885290 - DNA, 15 bp, Homo sapiens
tcctacaatatggta

SEQ ID NO: 1885291 - DNA, 15 bp, Homo sapiens
cctacaatatggtaa

SEQ ID NO: 1885292 - DNA, 15 bp, Homo sapiens
ctacaatatggtaat

SEQ ID NO: 1885293 - DNA, 15 bp, Homo sapiens
tacaatatggtaatc

SEQ ID NO: 1885294 - DNA, 15 bp, Homo sapiens
acaatatggtaatct

SEQ ID NO: 1885295 - DNA, 15 bp, Homo sapiens
caatatggtaatctt

SEQ ID NO: 1885296 - DNA, 15 bp, Homo sapiens
aatatggtaatctta

SEQ ID NO: 1885297 - DNA, 15 bp, Homo sapiens
atatggtaatcttat

SEQ ID NO: 1885298 - DNA, 15 bp, Homo sapiens
tatggtaatcttatt

SEQ ID NO: 1885299 - DNA, 15 bp, Homo sapiens
atggtaatcttatta

SEQ ID NO: 1885300 - DNA, 15 bp, Homo sapiens
tggtaatcttattaa

SEQ ID NO: 1885301 - DNA, 15 bp, Homo sapiens
ggtaatcttattaat

SEQ ID NO: 1885302 - DNA, 15 bp, Homo sapiens
gtaatcttattaatt

SEQ ID NO: 1885303 - DNA, 15 bp, Homo sapiens
taatcttattaattt

SEQ ID NO: 1885304 - DNA, 15 bp, Homo sapiens
aatcttattaatttt

SEQ ID NO: 1885305 - DNA, 15 bp, Homo sapiens
atcttattaattttc

SEQ ID NO: 1885306 - DNA, 15 bp, Homo sapiens
tcttattaattttct

SEQ ID NO: 1885307 - DNA, 15 bp, Homo sapiens
cttattaattttctt

SEQ ID NO: 1885308 - DNA, 15 bp, Homo sapiens
ttattaattttctta

SEQ ID NO: 1885309 - DNA, 15 bp, Homo sapiens
tattaattttcttat

SEQ ID NO: 1885310 - DNA, 15 bp, Homo sapiens
attaattttcttatt

SEQ ID NO: 1885311 - DNA, 15 bp, Homo sapiens
ttaattttcttattc

SEQ ID NO: 1885312 - DNA, 15 bp, Homo sapiens
taattttcttattcc

SEQ ID NO: 1885313 - DNA, 15 bp, Homo sapiens
aattttcttattcct

SEQ ID NO: 1885314 - DNA, 15 bp, Homo sapiens
attttcttattcctt

SEQ ID NO: 1885315 - DNA, 15 bp, Homo sapiens
ttttcttattccttt

SEQ ID NO: 1885316 - DNA, 15 bp, Homo sapiens
tttcttattcctttc

SEQ ID NO: 1885317 - DNA, 15 bp, Homo sapiens
ttcttattcctttcc

SEQ ID NO: 1885318 - DNA, 15 bp, Homo sapiens
tcttattcctttcct

SEQ ID NO: 1885319 - DNA, 15 bp, Homo sapiens
cttattcctttcctg

SEQ ID NO: 1885320 - DNA, 15 bp, Homo sapiens
ttattcctttcctgt

SEQ ID NO: 1885321 - DNA, 15 bp, Homo sapiens
tattcctttcctgta

SEQ ID NO: 1885322 - DNA, 15 bp, Homo sapiens
attcctttcctgtaa

SEQ ID NO: 1885323 - DNA, 15 bp, Homo sapiens
ttcctttcctgtaag

SEQ ID NO: 1885324 - DNA, 15 bp, Homo sapiens
tcctttcctgtaagg

SEQ ID NO: 1885325 - DNA, 15 bp, Homo sapiens
cctttcctgtaaggc

SEQ ID NO: 1885326 - DNA, 15 bp, Homo sapiens
ctttcctgtaaggca

SEQ ID NO: 1885327 - DNA, 15 bp, Homo sapiens
tttcctgtaaggcaa

SEQ ID NO: 1885328 - DNA, 15 bp, Homo sapiens
ttcctgtaaggcaaa

SEQ ID NO: 1885329 - DNA, 15 bp, Homo sapiens
tcctgtaaggcaaaa

SEQ ID NO: 1885330 - DNA, 15 bp, Homo sapiens
cctgtaaggcaaaag

SEQ ID NO: 1885331 - DNA, 15 bp, Homo sapiens
ctgtaaggcaaaagc

SEQ ID NO: 1885332 - DNA, 15 bp, Homo sapiens
tgtaaggcaaaagca

SEQ ID NO: 1885333 - DNA, 15 bp, Homo sapiens
gtaaggcaaaagcaa

SEQ ID NO: 1885334 - DNA, 15 bp, Homo sapiens
taaggcaaaagcaaa

SEQ ID NO: 1885335 - DNA, 15 bp, Homo sapiens
aaggcaaaagcaaac

SEQ ID NO: 1885336 - DNA, 15 bp, Homo sapiens
aggcaaaagcaaact

SEQ ID NO: 1885337 - DNA, 15 bp, Homo sapiens
ggcaaaagcaaactg

SEQ ID NO: 1885338 - DNA, 15 bp, Homo sapiens
gcaaaagcaaactgg

SEQ ID NO: 1885339 - DNA, 15 bp, Homo sapiens
caaaagcaaactggt

SEQ ID NO: 1885340 - DNA, 15 bp, Homo sapiens
aaaagcaaactggta

SEQ ID NO: 1885341 - DNA, 15 bp, Homo sapiens
aaagcaaactggtaa

SEQ ID NO: 1885342 - DNA, 15 bp, Homo sapiens
aagcaaactggtaaa

SEQ ID NO: 1885343 - DNA, 15 bp, Homo sapiens
agcaaactggtaaat

SEQ ID NO: 1885344 - DNA, 15 bp, Homo sapiens
gcaaactggtaaatt

SEQ ID NO: 1885345 - DNA, 15 bp, Homo sapiens
caaactggtaaatta

SEQ ID NO: 1885346 - DNA, 15 bp, Homo sapiens
aaactggtaaattat

SEQ ID NO: 1885347 - DNA, 15 bp, Homo sapiens
aactggtaaattatc

SEQ ID NO: 1885348 - DNA, 15 bp, Homo sapiens
actggtaaattatca

SEQ ID NO: 1885349 - DNA, 15 bp, Homo sapiens
ctggtaaattatcat

SEQ ID NO: 1885350 - DNA, 15 bp, Homo sapiens
tggtaaattatcata

SEQ ID NO: 1885351 - DNA, 15 bp, Homo sapiens
ggtaaattatcataa

SEQ ID NO: 1885352 - DNA, 15 bp, Homo sapiens
gtaaattatcataaa

SEQ ID NO: 1885353 - DNA, 15 bp, Homo sapiens
taaattatcataaaa

SEQ ID NO: 1885354 - DNA, 15 bp, Homo sapiens
aaattatcataaaat

SEQ ID NO: 1885355 - DNA, 15 bp, Homo sapiens
aattatcataaaatc

SEQ ID NO: 1885356 - DNA, 15 bp, Homo sapiens
attatcataaaatca

SEQ ID NO: 1885357 - DNA, 15 bp, Homo sapiens
ttatcataaaatcac

SEQ ID NO: 1885358 - DNA, 15 bp, Homo sapiens
tatcataaaatcact

SEQ ID NO: 1885359 - DNA, 15 bp, Homo sapiens
atcataaaatcactg

SEQ ID NO: 1885360 - DNA, 15 bp, Homo sapiens
tcataaaatcactgt

SEQ ID NO: 1885361 - DNA, 15 bp, Homo sapiens
cataaaatcactgtt

SEQ ID NO: 1885362 - DNA, 15 bp, Homo sapiens
ataaaatcactgtta

SEQ ID NO: 1885363 - DNA, 15 bp, Homo sapiens
taaaatcactgttag

SEQ ID NO: 1885364 - DNA, 15 bp, Homo sapiens
aaaatcactgttagc

SEQ ID NO: 1885365 - DNA, 15 bp, Homo sapiens
aaatcactgttagca

SEQ ID NO: 1885366 - DNA, 15 bp, Homo sapiens
aatcactgttagcat

SEQ ID NO: 1885367 - DNA, 15 bp, Homo sapiens
atcactgttagcatg

SEQ ID NO: 1885368 - DNA, 15 bp, Homo sapiens
tcactgttagcatga

SEQ ID NO: 1885369 - DNA, 15 bp, Homo sapiens
cactgttagcatgaa

SEQ ID NO: 1885370 - DNA, 15 bp, Homo sapiens
actgttagcatgaac

SEQ ID NO: 1885371 - DNA, 15 bp, Homo sapiens
ctgttagcatgaacc

SEQ ID NO: 1885372 - DNA, 15 bp, Homo sapiens
tgttagcatgaaccc

SEQ ID NO: 1885373 - DNA, 15 bp, Homo sapiens
gttagcatgaaccca

SEQ ID NO: 1885374 - DNA, 15 bp, Homo sapiens
ttagcatgaacccaa

SEQ ID NO: 1885375 - DNA, 15 bp, Homo sapiens
tagcatgaacccaaa

SEQ ID NO: 1885376 - DNA, 15 bp, Homo sapiens
agcatgaacccaaat

SEQ ID NO: 1885377 - DNA, 15 bp, Homo sapiens
gcatgaacccaaatt

SEQ ID NO: 1885378 - DNA, 15 bp, Homo sapiens
catgaacccaaatta

SEQ ID NO: 1885379 - DNA, 15 bp, Homo sapiens
atgaacccaaattaa

SEQ ID NO: 1885380 - DNA, 15 bp, Homo sapiens
tgaacccaaattaag

SEQ ID NO: 1885381 - DNA, 15 bp, Homo sapiens
gaacccaaattaaga

SEQ ID NO: 1885382 - DNA, 15 bp, Homo sapiens
aacccaaattaagac

SEQ ID NO: 1885383 - DNA, 15 bp, Homo sapiens
acccaaattaagact

SEQ ID NO: 1885384 - DNA, 15 bp, Homo sapiens
cccaaattaagacta

SEQ ID NO: 1885385 - DNA, 15 bp, Homo sapiens
ccaaattaagactat

SEQ ID NO: 1885386 - DNA, 15 bp, Homo sapiens
caaattaagactata

SEQ ID NO: 1885387 - DNA, 15 bp, Homo sapiens
aaattaagactataa

SEQ ID NO: 1885388 - DNA, 15 bp, Homo sapiens
aattaagactataag

SEQ ID NO: 1885389 - DNA, 15 bp, Homo sapiens
attaagactataagg

SEQ ID NO: 1885390 - DNA, 15 bp, Homo sapiens
ttaagactataaggc

SEQ ID NO: 1885391 - DNA, 15 bp, Homo sapiens
taagactataaggct

SEQ ID NO: 1885392 - DNA, 15 bp, Homo sapiens
aagactataaggctg

SEQ ID NO: 1885393 - DNA, 15 bp, Homo sapiens
agactataaggctgt

SEQ ID NO: 1885394 - DNA, 15 bp, Homo sapiens
gactataaggctgtt

SEQ ID NO: 1885395 - DNA, 15 bp, Homo sapiens
actataaggctgttt

SEQ ID NO: 1885396 - DNA, 15 bp, Homo sapiens
ctataaggctgtttg

SEQ ID NO: 1885397 - DNA, 15 bp, Homo sapiens
tataaggctgtttgc

SEQ ID NO: 1885398 - DNA, 15 bp, Homo sapiens
ataaggctgtttgca

SEQ ID NO: 1885399 - DNA, 15 bp, Homo sapiens
taaggctgtttgcat

SEQ ID NO: 1885400 - DNA, 15 bp, Homo sapiens
aaggctgtttgcata

SEQ ID NO: 1885401 - DNA, 15 bp, Homo sapiens
aggctgtttgcatat

SEQ ID NO: 1885402 - DNA, 15 bp, Homo sapiens
ggctgtttgcatatt

SEQ ID NO: 1885403 - DNA, 15 bp, Homo sapiens
gctgtttgcatatta

SEQ ID NO: 1885404 - DNA, 15 bp, Homo sapiens
ctgtttgcatattat

SEQ ID NO: 1885405 - DNA, 15 bp, Homo sapiens
tgtttgcatattata

SEQ ID NO: 1885406 - DNA, 15 bp, Homo sapiens
gtttgcatattatac

SEQ ID NO: 1885407 - DNA, 15 bp, Homo sapiens
tttgcatattatact

SEQ ID NO: 1885408 - DNA, 15 bp, Homo sapiens
ttgcatattatactc

SEQ ID NO: 1885409 - DNA, 15 bp, Homo sapiens
tgcatattatactct

SEQ ID NO: 1885410 - DNA, 15 bp, Homo sapiens
gcatattatactcta

SEQ ID NO: 1885411 - DNA, 15 bp, Homo sapiens
catattatactctat

SEQ ID NO: 1885412 - DNA, 15 bp, Homo sapiens
atattatactctata

SEQ ID NO: 1885413 - DNA, 15 bp, Homo sapiens
tattatactctatag

SEQ ID NO: 1885414 - DNA, 15 bp, Homo sapiens
attatactctatagt

SEQ ID NO: 1885415 - DNA, 15 bp, Homo sapiens
ttatactctatagtt

SEQ ID NO: 1885416 - DNA, 15 bp, Homo sapiens
tatactctatagttt

SEQ ID NO: 1885417 - DNA, 15 bp, Homo sapiens
atactctatagtttg

SEQ ID NO: 1885418 - DNA, 15 bp, Homo sapiens
tactctatagtttgt

SEQ ID NO: 1885419 - DNA, 15 bp, Homo sapiens
actctatagtttgtc

SEQ ID NO: 1885420 - DNA, 15 bp, Homo sapiens
ctctatagtttgtct

SEQ ID NO: 1885421 - DNA, 15 bp, Homo sapiens
tctatagtttgtctt

SEQ ID NO: 1885422 - DNA, 15 bp, Homo sapiens
ctatagtttgtcttg

SEQ ID NO: 1885423 - DNA, 15 bp, Homo sapiens
tatagtttgtcttgt

SEQ ID NO: 1885424 - DNA, 15 bp, Homo sapiens
atagtttgtcttgtc

SEQ ID NO: 1885425 - DNA, 15 bp, Homo sapiens
tagtttgtcttgtca

SEQ ID NO: 1885426 - DNA, 15 bp, Homo sapiens
agtttgtcttgtcat

SEQ ID NO: 1885427 - DNA, 15 bp, Homo sapiens
gtttgtcttgtcatg

SEQ ID NO: 1885428 - DNA, 15 bp, Homo sapiens
tttgtcttgtcatgt

SEQ ID NO: 1885429 - DNA, 15 bp, Homo sapiens
ttgtcttgtcatgta

SEQ ID NO: 1885430 - DNA, 15 bp, Homo sapiens
tgtcttgtcatgtac

SEQ ID NO: 1885431 - DNA, 15 bp, Homo sapiens
gtcttgtcatgtaca

SEQ ID NO: 1885432 - DNA, 15 bp, Homo sapiens
tcttgtcatgtacaa

SEQ ID NO: 1885433 - DNA, 15 bp, Homo sapiens
cttgtcatgtacaac

SEQ ID NO: 1885434 - DNA, 15 bp, Homo sapiens
ttgtcatgtacaacg

SEQ ID NO: 1885435 - DNA, 15 bp, Homo sapiens
tgtcatgtacaacgt

SEQ ID NO: 1885436 - DNA, 15 bp, Homo sapiens
gtcatgtacaacgtt

SEQ ID NO: 1885437 - DNA, 15 bp, Homo sapiens
tcatgtacaacgtta

SEQ ID NO: 1885438 - DNA, 15 bp, Homo sapiens
catgtacaacgttat

SEQ ID NO: 1885439 - DNA, 15 bp, Homo sapiens
atgtacaacgttatt

SEQ ID NO: 1885440 - DNA, 15 bp, Homo sapiens
tgtacaacgttatta

SEQ ID NO: 1885441 - DNA, 15 bp, Homo sapiens
gtacaacgttattat

SEQ ID NO: 1885442 - DNA, 15 bp, Homo sapiens
tacaacgttattatg

SEQ ID NO: 1885443 - DNA, 15 bp, Homo sapiens
acaacgttattatga

SEQ ID NO: 1885444 - DNA, 15 bp, Homo sapiens
caacgttattatgag

SEQ ID NO: 1885445 - DNA, 15 bp, Homo sapiens
aacgttattatgagg

SEQ ID NO: 1885446 - DNA, 15 bp, Homo sapiens
acgttattatgaggt

SEQ ID NO: 1885447 - DNA, 15 bp, Homo sapiens
cgttattatgaggta

SEQ ID NO: 1885448 - DNA, 15 bp, Homo sapiens
gttattatgaggtat

SEQ ID NO: 1885449 - DNA, 15 bp, Homo sapiens
ttattatgaggtatg

SEQ ID NO: 1885450 - DNA, 15 bp, Homo sapiens
tattatgaggtatgt

SEQ ID NO: 1885451 - DNA, 15 bp, Homo sapiens
attatgaggtatgtt

SEQ ID NO: 1885452 - DNA, 15 bp, Homo sapiens
ttatgaggtatgttt

SEQ ID NO: 1885453 - DNA, 15 bp, Homo sapiens
tatgaggtatgtttt

SEQ ID NO: 1885454 - DNA, 15 bp, Homo sapiens
atgaggtatgtttta

SEQ ID NO: 1885455 - DNA, 15 bp, Homo sapiens
tgaggtatgttttag

SEQ ID NO: 1885456 - DNA, 15 bp, Homo sapiens
gaggtatgttttaga

SEQ ID NO: 1885457 - DNA, 15 bp, Homo sapiens
aggtatgttttagac

SEQ ID NO: 1885458 - DNA, 15 bp, Homo sapiens
ggtatgttttagact

SEQ ID NO: 1885459 - DNA, 15 bp, Homo sapiens
gtatgttttagactg

SEQ ID NO: 1885460 - DNA, 15 bp, Homo sapiens
tatgttttagactga

SEQ ID NO: 1885461 - DNA, 15 bp, Homo sapiens
atgttttagactgac

SEQ ID NO: 1885462 - DNA, 15 bp, Homo sapiens
tgttttagactgaca

SEQ ID NO: 1885463 - DNA, 15 bp, Homo sapiens
gttttagactgacag

SEQ ID NO: 1885464 - DNA, 15 bp, Homo sapiens
ttttagactgacaga

SEQ ID NO: 1885465 - DNA, 15 bp, Homo sapiens
tttagactgacagaa

SEQ ID NO: 1885466 - DNA, 15 bp, Homo sapiens
ttagactgacagaaa

SEQ ID NO: 1885467 - DNA, 15 bp, Homo sapiens
tagactgacagaaaa

SEQ ID NO: 1885468 - DNA, 15 bp, Homo sapiens
agactgacagaaaat

SEQ ID NO: 1885469 - DNA, 15 bp, Homo sapiens
gactgacagaaaata

SEQ ID NO: 1885470 - DNA, 15 bp, Homo sapiens
actgacagaaaatag

SEQ ID NO: 1885471 - DNA, 15 bp, Homo sapiens
ctgacagaaaatagt

SEQ ID NO: 1885472 - DNA, 15 bp, Homo sapiens
tgacagaaaatagtt

SEQ ID NO: 1885473 - DNA, 15 bp, Homo sapiens
gacagaaaatagttt

SEQ ID NO: 1885474 - DNA, 15 bp, Homo sapiens
acagaaaatagtttt

SEQ ID NO: 1885475 - DNA, 15 bp, Homo sapiens
cagaaaatagtttta

SEQ ID NO: 1885476 - DNA, 15 bp, Homo sapiens
agaaaatagttttac

SEQ ID NO: 1885477 - DNA, 15 bp, Homo sapiens
gaaaatagttttact

SEQ ID NO: 1885478 - DNA, 15 bp, Homo sapiens
aaaatagttttactt

SEQ ID NO: 1885479 - DNA, 15 bp, Homo sapiens
aaatagttttacttc

SEQ ID NO: 1885480 - DNA, 15 bp, Homo sapiens
aatagttttacttct

SEQ ID NO: 1885481 - DNA, 15 bp, Homo sapiens
atagttttacttctg

SEQ ID NO: 1885482 - DNA, 15 bp, Homo sapiens
tagttttacttctgc

SEQ ID NO: 1885483 - DNA, 15 bp, Homo sapiens
agttttacttctgcc

SEQ ID NO: 1885484 - DNA, 15 bp, Homo sapiens
gttttacttctgcct

SEQ ID NO: 1885485 - DNA, 15 bp, Homo sapiens
ttttacttctgccta

SEQ ID NO: 1885486 - DNA, 15 bp, Homo sapiens
tttacttctgcctat

SEQ ID NO: 1885487 - DNA, 15 bp, Homo sapiens
ttacttctgcctata

SEQ ID NO: 1885488 - DNA, 15 bp, Homo sapiens
tacttctgcctatac

SEQ ID NO: 1885489 - DNA, 15 bp, Homo sapiens
acttctgcctatact

SEQ ID NO: 1885490 - DNA, 15 bp, Homo sapiens
cttctgcctatactt

SEQ ID NO: 1885491 - DNA, 15 bp, Homo sapiens
ttctgcctatacttt

SEQ ID NO: 1885492 - DNA, 15 bp, Homo sapiens
tctgcctatactttt

SEQ ID NO: 1885493 - DNA, 15 bp, Homo sapiens
ctgcctatactttta

SEQ ID NO: 1885494 - DNA, 15 bp, Homo sapiens
tgcctatacttttat

SEQ ID NO: 1885495 - DNA, 15 bp, Homo sapiens
gcctatacttttatc

SEQ ID NO: 1885496 - DNA, 15 bp, Homo sapiens
cctatacttttatct

SEQ ID NO: 1885497 - DNA, 15 bp, Homo sapiens
ctatacttttatcta

SEQ ID NO: 1885498 - DNA, 15 bp, Homo sapiens
tatacttttatctat

SEQ ID NO: 1885499 - DNA, 15 bp, Homo sapiens
atacttttatctata

SEQ ID NO: 1885500 - DNA, 15 bp, Homo sapiens
tacttttatctataa

SEQ ID NO: 1885501 - DNA, 15 bp, Homo sapiens
acttttatctataag

SEQ ID NO: 1885502 - DNA, 15 bp, Homo sapiens
cttttatctataagg

SEQ ID NO: 1885503 - DNA, 15 bp, Homo sapiens
ttttatctataaggt

SEQ ID NO: 1885504 - DNA, 15 bp, Homo sapiens
tttatctataaggtt

SEQ ID NO: 1885505 - DNA, 15 bp, Homo sapiens
ttatctataaggttt

SEQ ID NO: 1885506 - DNA, 15 bp, Homo sapiens
tatctataaggtttt

SEQ ID NO: 1885507 - DNA, 15 bp, Homo sapiens
atctataaggtttta

SEQ ID NO: 1885508 - DNA, 15 bp, Homo sapiens
tctataaggttttag

SEQ ID NO: 1885509 - DNA, 15 bp, Homo sapiens
ctataaggttttaga

SEQ ID NO: 1885510 - DNA, 15 bp, Homo sapiens
tataaggttttagaa

SEQ ID NO: 1885511 - DNA, 15 bp, Homo sapiens
ataaggttttagaag

SEQ ID NO: 1885512 - DNA, 15 bp, Homo sapiens
taaggttttagaagt

SEQ ID NO: 1885513 - DNA, 15 bp, Homo sapiens
aaggttttagaagta

SEQ ID NO: 1885514 - DNA, 15 bp, Homo sapiens
aggttttagaagtaa

SEQ ID NO: 1885515 - DNA, 15 bp, Homo sapiens
ggttttagaagtaaa

SEQ ID NO: 1885516 - DNA, 15 bp, Homo sapiens
gttttagaagtaaat

SEQ ID NO: 1885517 - DNA, 15 bp, Homo sapiens
ttttagaagtaaatt

SEQ ID NO: 1885518 - DNA, 15 bp, Homo sapiens
tttagaagtaaattc

SEQ ID NO: 1885519 - DNA, 15 bp, Homo sapiens
ttagaagtaaattca

SEQ ID NO: 1885520 - DNA, 15 bp, Homo sapiens
tagaagtaaattcat

SEQ ID NO: 1885521 - DNA, 15 bp, Homo sapiens
agaagtaaattcata

SEQ ID NO: 1885522 - DNA, 15 bp, Homo sapiens
gaagtaaattcatag

SEQ ID NO: 1885523 - DNA, 15 bp, Homo sapiens
aagtaaattcataga

SEQ ID NO: 1885524 - DNA, 15 bp, Homo sapiens
agtaaattcatagaa

SEQ ID NO: 1885525 - DNA, 15 bp, Homo sapiens
gtaaattcatagaat

SEQ ID NO: 1885526 - DNA, 15 bp, Homo sapiens
taaattcatagaatc

SEQ ID NO: 1885527 - DNA, 15 bp, Homo sapiens
aaattcatagaatca

SEQ ID NO: 1885528 - DNA, 15 bp, Homo sapiens
aattcatagaatcag

SEQ ID NO: 1885529 - DNA, 15 bp, Homo sapiens
attcatagaatcagt

SEQ ID NO: 1885530 - DNA, 15 bp, Homo sapiens
ttcatagaatcagtt

SEQ ID NO: 1885531 - DNA, 15 bp, Homo sapiens
tcatagaatcagttt

SEQ ID NO: 1885532 - DNA, 15 bp, Homo sapiens
catagaatcagtttg

SEQ ID NO: 1885533 - DNA, 15 bp, Homo sapiens
atagaatcagtttgg

SEQ ID NO: 1885534 - DNA, 15 bp, Homo sapiens
tagaatcagtttgga

SEQ ID NO: 1885535 - DNA, 15 bp, Homo sapiens
agaatcagtttggac

SEQ ID NO: 1885536 - DNA, 15 bp, Homo sapiens
gaatcagtttggacc

SEQ ID NO: 1885537 - DNA, 15 bp, Homo sapiens
aatcagtttggacct

SEQ ID NO: 1885538 - DNA, 15 bp, Homo sapiens
atcagtttggacctc

SEQ ID NO: 1885539 - DNA, 15 bp, Homo sapiens
tcagtttggacctct

SEQ ID NO: 1885540 - DNA, 15 bp, Homo sapiens
cagtttggacctctt

SEQ ID NO: 1885541 - DNA, 15 bp, Homo sapiens
agtttggacctcttg

SEQ ID NO: 1885542 - DNA, 15 bp, Homo sapiens
gtttggacctcttga

SEQ ID NO: 1885543 - DNA, 15 bp, Homo sapiens
tttggacctcttgaa

SEQ ID NO: 1885544 - DNA, 15 bp, Homo sapiens
ttggacctcttgaaa

SEQ ID NO: 1885545 - DNA, 15 bp, Homo sapiens
tggacctcttgaaat

SEQ ID NO: 1885546 - DNA, 15 bp, Homo sapiens
ggacctcttgaaata

SEQ ID NO: 1885547 - DNA, 15 bp, Homo sapiens
gacctcttgaaataa

SEQ ID NO: 1885548 - DNA, 15 bp, Homo sapiens
acctcttgaaataat

SEQ ID NO: 1885549 - DNA, 15 bp, Homo sapiens
cctcttgaaataatt

SEQ ID NO: 1885550 - DNA, 15 bp, Homo sapiens
ctcttgaaataattt

SEQ ID NO: 1885551 - DNA, 15 bp, Homo sapiens
tcttgaaataatttt

SEQ ID NO: 1885552 - DNA, 15 bp, Homo sapiens
cttgaaataatttta

SEQ ID NO: 1885553 - DNA, 15 bp, Homo sapiens
ttgaaataattttag

SEQ ID NO: 1885554 - DNA, 15 bp, Homo sapiens
tgaaataattttagg

SEQ ID NO: 1885555 - DNA, 15 bp, Homo sapiens
gaaataattttagga

SEQ ID NO: 1885556 - DNA, 15 bp, Homo sapiens
aaataattttaggag

SEQ ID NO: 1885557 - DNA, 15 bp, Homo sapiens
aataattttaggagt

SEQ ID NO: 1885558 - DNA, 15 bp, Homo sapiens
ataattttaggagtt

SEQ ID NO: 1885559 - DNA, 15 bp, Homo sapiens
taattttaggagtta

SEQ ID NO: 1885560 - DNA, 15 bp, Homo sapiens
aattttaggagttat

SEQ ID NO: 1885561 - DNA, 15 bp, Homo sapiens
attttaggagttatg

SEQ ID NO: 1885562 - DNA, 15 bp, Homo sapiens
ttttaggagttatga

SEQ ID NO: 1885563 - DNA, 15 bp, Homo sapiens
tttaggagttatgaa

SEQ ID NO: 1885564 - DNA, 15 bp, Homo sapiens
ttaggagttatgaac

SEQ ID NO: 1885565 - DNA, 15 bp, Homo sapiens
taggagttatgaact

SEQ ID NO: 1885566 - DNA, 15 bp, Homo sapiens
aggagttatgaacta

SEQ ID NO: 1885567 - DNA, 15 bp, Homo sapiens
ggagttatgaactag

SEQ ID NO: 1885568 - DNA, 15 bp, Homo sapiens
gagttatgaactagc

SEQ ID NO: 1885569 - DNA, 15 bp, Homo sapiens
agttatgaactagct

SEQ ID NO: 1885570 - DNA, 15 bp, Homo sapiens
gttatgaactagctg

SEQ ID NO: 1885571 - DNA, 15 bp, Homo sapiens
ttatgaactagctga

SEQ ID NO: 1885572 - DNA, 15 bp, Homo sapiens
tatgaactagctgat

SEQ ID NO: 1885573 - DNA, 15 bp, Homo sapiens
atgaactagctgatt

SEQ ID NO: 1885574 - DNA, 15 bp, Homo sapiens
tgaactagctgattt

SEQ ID NO: 1885575 - DNA, 15 bp, Homo sapiens
gaactagctgatttt

SEQ ID NO: 1885576 - DNA, 15 bp, Homo sapiens
aactagctgattttg

SEQ ID NO: 1885577 - DNA, 15 bp, Homo sapiens
actagctgattttgg

SEQ ID NO: 1885578 - DNA, 15 bp, Homo sapiens
ctagctgattttggc

SEQ ID NO: 1885579 - DNA, 15 bp, Homo sapiens
tagctgattttggca

SEQ ID NO: 1885580 - DNA, 15 bp, Homo sapiens
agctgattttggcat

SEQ ID NO: 1885581 - DNA, 15 bp, Homo sapiens
gctgattttggcatg

SEQ ID NO: 1885582 - DNA, 15 bp, Homo sapiens
ctgattttggcatgc

SEQ ID NO: 1885583 - DNA, 15 bp, Homo sapiens
tgattttggcatgca

SEQ ID NO: 1885584 - DNA, 15 bp, Homo sapiens
gattttggcatgcat

SEQ ID NO: 1885585 - DNA, 15 bp, Homo sapiens
attttggcatgcatc

SEQ ID NO: 1885586 - DNA, 15 bp, Homo sapiens
ttttggcatgcatct

SEQ ID NO: 1885587 - DNA, 15 bp, Homo sapiens
tttggcatgcatctt

SEQ ID NO: 1885588 - DNA, 15 bp, Homo sapiens
ttggcatgcatcttg

SEQ ID NO: 1885589 - DNA, 15 bp, Homo sapiens
tggcatgcatcttga

SEQ ID NO: 1885590 - DNA, 15 bp, Homo sapiens
ggcatgcatcttgat

SEQ ID NO: 1885591 - DNA, 15 bp, Homo sapiens
gcatgcatcttgatt

SEQ ID NO: 1885592 - DNA, 15 bp, Homo sapiens
catgcatcttgattt

SEQ ID NO: 1885593 - DNA, 15 bp, Homo sapiens
atgcatcttgatttg

SEQ ID NO: 1885594 - DNA, 15 bp, Homo sapiens
tgcatcttgatttgg

SEQ ID NO: 1885595 - DNA, 15 bp, Homo sapiens
gcatcttgatttggc

SEQ ID NO: 1885596 - DNA, 15 bp, Homo sapiens
catcttgatttggca

SEQ ID NO: 1885597 - DNA, 15 bp, Homo sapiens
atcttgatttggcaa

SEQ ID NO: 1885598 - DNA, 15 bp, Homo sapiens
tcttgatttggcaag

SEQ ID NO: 1885599 - DNA, 15 bp, Homo sapiens
cttgatttggcaagt

SEQ ID NO: 1885600 - DNA, 15 bp, Homo sapiens
ttgatttggcaagtg

SEQ ID NO: 1885601 - DNA, 15 bp, Homo sapiens
tgatttggcaagtga

SEQ ID NO: 1885602 - DNA, 15 bp, Homo sapiens
gatttggcaagtgag

SEQ ID NO: 1885603 - DNA, 15 bp, Homo sapiens
atttggcaagtgagg

SEQ ID NO: 1885604 - DNA, 15 bp, Homo sapiens
tttggcaagtgagga

SEQ ID NO: 1885605 - DNA, 15 bp, Homo sapiens
ttggcaagtgaggaa

SEQ ID NO: 1885606 - DNA, 15 bp, Homo sapiens
tggcaagtgaggaaa

SEQ ID NO: 1885607 - DNA, 15 bp, Homo sapiens
ggcaagtgaggaaac

SEQ ID NO: 1885608 - DNA, 15 bp, Homo sapiens
gcaagtgaggaaact

SEQ ID NO: 1885609 - DNA, 15 bp, Homo sapiens
caagtgaggaaactc

SEQ ID NO: 1885610 - DNA, 15 bp, Homo sapiens
aagtgaggaaactca

SEQ ID NO: 1885611 - DNA, 15 bp, Homo sapiens
agtgaggaaactcag

SEQ ID NO: 1885612 - DNA, 15 bp, Homo sapiens
gtgaggaaactcagg

SEQ ID NO: 1885613 - DNA, 15 bp, Homo sapiens
tgaggaaactcaggc

SEQ ID NO: 1885614 - DNA, 15 bp, Homo sapiens
gaggaaactcaggcc

SEQ ID NO: 1885615 - DNA, 15 bp, Homo sapiens
aggaaactcaggccc

SEQ ID NO: 1885616 - DNA, 15 bp, Homo sapiens
ggaaactcaggccca

SEQ ID NO: 1885617 - DNA, 15 bp, Homo sapiens
gaaactcaggcccag

SEQ ID NO: 1885618 - DNA, 15 bp, Homo sapiens
aaactcaggcccaga

SEQ ID NO: 1885619 - DNA, 15 bp, Homo sapiens
aactcaggcccagag

SEQ ID NO: 1885620 - DNA, 15 bp, Homo sapiens
actcaggcccagaga

SEQ ID NO: 1885621 - DNA, 15 bp, Homo sapiens
ctcaggcccagagag

SEQ ID NO: 1885622 - DNA, 15 bp, Homo sapiens
tcaggcccagagaga

SEQ ID NO: 1885623 - DNA, 15 bp, Homo sapiens
caggcccagagagat

SEQ ID NO: 1885624 - DNA, 15 bp, Homo sapiens
aggcccagagagatt

SEQ ID NO: 1885625 - DNA, 15 bp, Homo sapiens
ggcccagagagatta

SEQ ID NO: 1885626 - DNA, 15 bp, Homo sapiens
gcccagagagattag

SEQ ID NO: 1885627 - DNA, 15 bp, Homo sapiens
cccagagagattagg

SEQ ID NO: 1885628 - DNA, 15 bp, Homo sapiens
ccagagagattaggc

SEQ ID NO: 1885629 - DNA, 15 bp, Homo sapiens
cagagagattaggca

SEQ ID NO: 1885630 - DNA, 15 bp, Homo sapiens
agagagattaggcaa

SEQ ID NO: 1885631 - DNA, 15 bp, Homo sapiens
gagagattaggcaaa

SEQ ID NO: 1885632 - DNA, 15 bp, Homo sapiens
agagattaggcaaaa

SEQ ID NO: 1885633 - DNA, 15 bp, Homo sapiens
gagattaggcaaaac

SEQ ID NO: 1885634 - DNA, 15 bp, Homo sapiens
agattaggcaaaact

SEQ ID NO: 1885635 - DNA, 15 bp, Homo sapiens
gattaggcaaaactt

SEQ ID NO: 1885636 - DNA, 15 bp, Homo sapiens
attaggcaaaacttt

SEQ ID NO: 1885637 - DNA, 15 bp, Homo sapiens
ttaggcaaaactttc

SEQ ID NO: 1885638 - DNA, 15 bp, Homo sapiens
taggcaaaactttcc

SEQ ID NO: 1885639 - DNA, 15 bp, Homo sapiens
aggcaaaactttcca

SEQ ID NO: 1885640 - DNA, 15 bp, Homo sapiens
ggcaaaactttccaa

SEQ ID NO: 1885641 - DNA, 15 bp, Homo sapiens
gcaaaactttccaaa

SEQ ID NO: 1885642 - DNA, 15 bp, Homo sapiens
caaaactttccaaag

SEQ ID NO: 1885643 - DNA, 15 bp, Homo sapiens
aaaactttccaaagt

SEQ ID NO: 1885644 - DNA, 15 bp, Homo sapiens
aaactttccaaagtc

SEQ ID NO: 1885645 - DNA, 15 bp, Homo sapiens
aactttccaaagtcc

SEQ ID NO: 1885646 - DNA, 15 bp, Homo sapiens
actttccaaagtccc

SEQ ID NO: 1885647 - DNA, 15 bp, Homo sapiens
ctttccaaagtcccg

SEQ ID NO: 1885648 - DNA, 15 bp, Homo sapiens
tttccaaagtcccgg

SEQ ID NO: 1885649 - DNA, 15 bp, Homo sapiens
ttccaaagtcccgga

SEQ ID NO: 1885650 - DNA, 15 bp, Homo sapiens
tccaaagtcccggag

SEQ ID NO: 1885651 - DNA, 15 bp, Homo sapiens
ccaaagtcccggagc

SEQ ID NO: 1885652 - DNA, 15 bp, Homo sapiens
caaagtcccggagcc

SEQ ID NO: 1885653 - DNA, 15 bp, Homo sapiens
aaagtcccggagcct

SEQ ID NO: 1885654 - DNA, 15 bp, Homo sapiens
aagtcccggagcctg

SEQ ID NO: 1885655 - DNA, 15 bp, Homo sapiens
agtcccggagcctga

SEQ ID NO: 1885656 - DNA, 15 bp, Homo sapiens
gtcccggagcctgag

SEQ ID NO: 1885657 - DNA, 15 bp, Homo sapiens
tcccggagcctgagc

SEQ ID NO: 1885658 - DNA, 15 bp, Homo sapiens
cccggagcctgagcc

SEQ ID NO: 1885659 - DNA, 15 bp, Homo sapiens
ccggagcctgagcca

SEQ ID NO: 1885660 - DNA, 15 bp, Homo sapiens
cggagcctgagccac

SEQ ID NO: 1885661 - DNA, 15 bp, Homo sapiens
ggagcctgagccaca

SEQ ID NO: 1885662 - DNA, 15 bp, Homo sapiens
gagcctgagccacat

SEQ ID NO: 1885663 - DNA, 15 bp, Homo sapiens
agcctgagccacatt

SEQ ID NO: 1885664 - DNA, 15 bp, Homo sapiens
gcctgagccacattt

SEQ ID NO: 1885665 - DNA, 15 bp, Homo sapiens
cctgagccacatttt

SEQ ID NO: 1885666 - DNA, 15 bp, Homo sapiens
ctgagccacattttg

SEQ ID NO: 1885667 - DNA, 15 bp, Homo sapiens
tgagccacattttgt

SEQ ID NO: 1885668 - DNA, 15 bp, Homo sapiens
gagccacattttgtg

SEQ ID NO: 1885669 - DNA, 15 bp, Homo sapiens
agccacattttgtga

SEQ ID NO: 1885670 - DNA, 15 bp, Homo sapiens
gccacattttgtgat

SEQ ID NO: 1885671 - DNA, 15 bp, Homo sapiens
ccacattttgtgatt

SEQ ID NO: 1885672 - DNA, 15 bp, Homo sapiens
cacattttgtgatta

SEQ ID NO: 1885673 - DNA, 15 bp, Homo sapiens
acattttgtgattaa

SEQ ID NO: 1885674 - DNA, 15 bp, Homo sapiens
cattttgtgattaac

SEQ ID NO: 1885675 - DNA, 15 bp, Homo sapiens
attttgtgattaacc

SEQ ID NO: 1885676 - DNA, 15 bp, Homo sapiens
ttttgtgattaacca

SEQ ID NO: 1885677 - DNA, 15 bp, Homo sapiens
tttgtgattaaccac

SEQ ID NO: 1885678 - DNA, 15 bp, Homo sapiens
ttgtgattaaccacc

SEQ ID NO: 1885679 - DNA, 15 bp, Homo sapiens
tgtgattaaccaccc

SEQ ID NO: 1885680 - DNA, 15 bp, Homo sapiens
gtgattaaccaccca

SEQ ID NO: 1885681 - DNA, 15 bp, Homo sapiens
tgattaaccacccag

SEQ ID NO: 1885682 - DNA, 15 bp, Homo sapiens
gattaaccacccaga

SEQ ID NO: 1885683 - DNA, 15 bp, Homo sapiens
attaaccacccagag

SEQ ID NO: 1885684 - DNA, 15 bp, Homo sapiens
ttaaccacccagagt

SEQ ID NO: 1885685 - DNA, 15 bp, Homo sapiens
taaccacccagagtt

SEQ ID NO: 1885686 - DNA, 15 bp, Homo sapiens
aaccacccagagttt

SEQ ID NO: 1885687 - DNA, 15 bp, Homo sapiens
accacccagagtttt

SEQ ID NO: 1885688 - DNA, 15 bp, Homo sapiens
ccacccagagttttt

SEQ ID NO: 1885689 - DNA, 15 bp, Homo sapiens
cacccagagtttttc

SEQ ID NO: 1885690 - DNA, 15 bp, Homo sapiens
acccagagtttttcc

SEQ ID NO: 1885691 - DNA, 15 bp, Homo sapiens
cccagagtttttcca

SEQ ID NO: 1885692 - DNA, 15 bp, Homo sapiens
ccagagtttttccac

SEQ ID NO: 1885693 - DNA, 15 bp, Homo sapiens
cagagtttttccaca

SEQ ID NO: 1885694 - DNA, 15 bp, Homo sapiens
agagtttttccacat

SEQ ID NO: 1885695 - DNA, 15 bp, Homo sapiens
gagtttttccacatt

SEQ ID NO: 1885696 - DNA, 15 bp, Homo sapiens
agtttttccacattg

SEQ ID NO: 1885697 - DNA, 15 bp, Homo sapiens
gtttttccacattgc

SEQ ID NO: 1885698 - DNA, 15 bp, Homo sapiens
tttttccacattgct

SEQ ID NO: 1885699 - DNA, 15 bp, Homo sapiens
ttttccacattgctt

SEQ ID NO: 1885700 - DNA, 15 bp, Homo sapiens
tttccacattgcttc

SEQ ID NO: 1885701 - DNA, 15 bp, Homo sapiens
ttccacattgcttcc

SEQ ID NO: 1885702 - DNA, 15 bp, Homo sapiens
tccacattgcttccc

SEQ ID NO: 1885703 - DNA, 15 bp, Homo sapiens
ccacattgcttccca

SEQ ID NO: 1885704 - DNA, 15 bp, Homo sapiens
cacattgcttcccat

SEQ ID NO: 1885705 - DNA, 15 bp, Homo sapiens
acattgcttcccatg

SEQ ID NO: 1885706 - DNA, 15 bp, Homo sapiens
cattgcttcccatgt

SEQ ID NO: 1885707 - DNA, 15 bp, Homo sapiens
attgcttcccatgta

SEQ ID NO: 1885708 - DNA, 15 bp, Homo sapiens
ttgcttcccatgtaa

SEQ ID NO: 1885709 - DNA, 15 bp, Homo sapiens
tgcttcccatgtaaa

SEQ ID NO: 1885710 - DNA, 15 bp, Homo sapiens
gcttcccatgtaaag

SEQ ID NO: 1885711 - DNA, 15 bp, Homo sapiens
cttcccatgtaaagg

SEQ ID NO: 1885712 - DNA, 15 bp, Homo sapiens
ttcccatgtaaaggg

SEQ ID NO: 1885713 - DNA, 15 bp, Homo sapiens
tcccatgtaaagggt

SEQ ID NO: 1885714 - DNA, 15 bp, Homo sapiens
cccatgtaaagggta

SEQ ID NO: 1885715 - DNA, 15 bp, Homo sapiens
ccatgtaaagggtag

SEQ ID NO: 1885716 - DNA, 15 bp, Homo sapiens
catgtaaagggtagt

SEQ ID NO: 1885717 - DNA, 15 bp, Homo sapiens
atgtaaagggtagtg

SEQ ID NO: 1885718 - DNA, 15 bp, Homo sapiens
tgtaaagggtagtga

SEQ ID NO: 1885719 - DNA, 15 bp, Homo sapiens
gtaaagggtagtgaa

SEQ ID NO: 1885720 - DNA, 15 bp, Homo sapiens
taaagggtagtgaat

SEQ ID NO: 1885721 - DNA, 15 bp, Homo sapiens
aaagggtagtgaata

SEQ ID NO: 1885722 - DNA, 15 bp, Homo sapiens
aagggtagtgaatag

SEQ ID NO: 1885723 - DNA, 15 bp, Homo sapiens
agggtagtgaataga

SEQ ID NO: 1885724 - DNA, 15 bp, Homo sapiens
gggtagtgaatagaa

SEQ ID NO: 1885725 - DNA, 15 bp, Homo sapiens
ggtagtgaatagaat

SEQ ID NO: 1885726 - DNA, 15 bp, Homo sapiens
gtagtgaatagaatt

SEQ ID NO: 1885727 - DNA, 15 bp, Homo sapiens
tagtgaatagaatta

SEQ ID NO: 1885728 - DNA, 15 bp, Homo sapiens
agtgaatagaattat

SEQ ID NO: 1885729 - DNA, 15 bp, Homo sapiens
gtgaatagaattatc

SEQ ID NO: 1885730 - DNA, 15 bp, Homo sapiens
tgaatagaattatct

SEQ ID NO: 1885731 - DNA, 15 bp, Homo sapiens
gaatagaattatctt

SEQ ID NO: 1885732 - DNA, 15 bp, Homo sapiens
aatagaattatctta

SEQ ID NO: 1885733 - DNA, 15 bp, Homo sapiens
atagaattatcttat

SEQ ID NO: 1885734 - DNA, 15 bp, Homo sapiens
tagaattatcttatc

SEQ ID NO: 1885735 - DNA, 15 bp, Homo sapiens
agaattatcttatca

SEQ ID NO: 1885736 - DNA, 15 bp, Homo sapiens
gaattatcttatcaa

SEQ ID NO: 1885737 - DNA, 15 bp, Homo sapiens
aattatcttatcaaa

SEQ ID NO: 1885738 - DNA, 15 bp, Homo sapiens
attatcttatcaaat

SEQ ID NO: 1885739 - DNA, 15 bp, Homo sapiens
ttatcttatcaaatg

SEQ ID NO: 1885740 - DNA, 15 bp, Homo sapiens
tatcttatcaaatgg

SEQ ID NO: 1885741 - DNA, 15 bp, Homo sapiens
atcttatcaaatggc

SEQ ID NO: 1885742 - DNA, 15 bp, Homo sapiens
tcttatcaaatggca

SEQ ID NO: 1885743 - DNA, 15 bp, Homo sapiens
cttatcaaatggcag

SEQ ID NO: 1885744 - DNA, 15 bp, Homo sapiens
ttatcaaatggcagg

SEQ ID NO: 1885745 - DNA, 15 bp, Homo sapiens
tatcaaatggcagga

SEQ ID NO: 1885746 - DNA, 15 bp, Homo sapiens
atcaaatggcaggaa

SEQ ID NO: 1885747 - DNA, 15 bp, Homo sapiens
tcaaatggcaggaag

SEQ ID NO: 1885748 - DNA, 15 bp, Homo sapiens
caaatggcaggaagg

SEQ ID NO: 1885749 - DNA, 15 bp, Homo sapiens
aaatggcaggaaggg

SEQ ID NO: 1885750 - DNA, 15 bp, Homo sapiens
aatggcaggaagggt

SEQ ID NO: 1885751 - DNA, 15 bp, Homo sapiens
atggcaggaagggtg

SEQ ID NO: 1885752 - DNA, 15 bp, Homo sapiens
tggcaggaagggtgt

SEQ ID NO: 1885753 - DNA, 15 bp, Homo sapiens
ggcaggaagggtgtt

SEQ ID NO: 1885754 - DNA, 15 bp, Homo sapiens
gcaggaagggtgttt

SEQ ID NO: 1885755 - DNA, 15 bp, Homo sapiens
caggaagggtgtttt

SEQ ID NO: 1885756 - DNA, 15 bp, Homo sapiens
aggaagggtgttttg

SEQ ID NO: 1885757 - DNA, 15 bp, Homo sapiens
ggaagggtgttttgc

SEQ ID NO: 1885758 - DNA, 15 bp, Homo sapiens
gaagggtgttttgct

SEQ ID NO: 1885759 - DNA, 15 bp, Homo sapiens
aagggtgttttgctg

SEQ ID NO: 1885760 - DNA, 15 bp, Homo sapiens
agggtgttttgctga

SEQ ID NO: 1885761 - DNA, 15 bp, Homo sapiens
gggtgttttgctgaa

SEQ ID NO: 1885762 - DNA, 15 bp, Homo sapiens
ggtgttttgctgaat

SEQ ID NO: 1885763 - DNA, 15 bp, Homo sapiens
gtgttttgctgaatt

SEQ ID NO: 1885764 - DNA, 15 bp, Homo sapiens
tgttttgctgaatta

SEQ ID NO: 1885765 - DNA, 15 bp, Homo sapiens
gttttgctgaattaa

SEQ ID NO: 1885766 - DNA, 15 bp, Homo sapiens
ttttgctgaattaat

SEQ ID NO: 1885767 - DNA, 15 bp, Homo sapiens
tttgctgaattaatt

SEQ ID NO: 1885768 - DNA, 15 bp, Homo sapiens
ttgctgaattaatta

SEQ ID NO: 1885769 - DNA, 15 bp, Homo sapiens
tgctgaattaattag

SEQ ID NO: 1885770 - DNA, 15 bp, Homo sapiens
gctgaattaattagc

SEQ ID NO: 1885771 - DNA, 15 bp, Homo sapiens
ctgaattaattagct

SEQ ID NO: 1885772 - DNA, 15 bp, Homo sapiens
tgaattaattagctt

SEQ ID NO: 1885773 - DNA, 15 bp, Homo sapiens
gaattaattagcttg

SEQ ID NO: 1885774 - DNA, 15 bp, Homo sapiens
aattaattagcttgt

SEQ ID NO: 1885775 - DNA, 15 bp, Homo sapiens
attaattagcttgta

SEQ ID NO: 1885776 - DNA, 15 bp, Homo sapiens
ttaattagcttgtag

SEQ ID NO: 1885777 - DNA, 15 bp, Homo sapiens
taattagcttgtagt

SEQ ID NO: 1885778 - DNA, 15 bp, Homo sapiens
aattagcttgtagtg

SEQ ID NO: 1885779 - DNA, 15 bp, Homo sapiens
attagcttgtagtgt

SEQ ID NO: 1885780 - DNA, 15 bp, Homo sapiens
ttagcttgtagtgtc

SEQ ID NO: 1885781 - DNA, 15 bp, Homo sapiens
tagcttgtagtgtca

SEQ ID NO: 1885782 - DNA, 15 bp, Homo sapiens
agcttgtagtgtcac

SEQ ID NO: 1885783 - DNA, 15 bp, Homo sapiens
gcttgtagtgtcact

SEQ ID NO: 1885784 - DNA, 15 bp, Homo sapiens
cttgtagtgtcactg

SEQ ID NO: 1885785 - DNA, 15 bp, Homo sapiens
ttgtagtgtcactga

SEQ ID NO: 1885786 - DNA, 15 bp, Homo sapiens
tgtagtgtcactgaa

SEQ ID NO: 1885787 - DNA, 15 bp, Homo sapiens
gtagtgtcactgaac

SEQ ID NO: 1885788 - DNA, 15 bp, Homo sapiens
tagtgtcactgaact

SEQ ID NO: 1885789 - DNA, 15 bp, Homo sapiens
agtgtcactgaactt

SEQ ID NO: 1885790 - DNA, 15 bp, Homo sapiens
gtgtcactgaactta

SEQ ID NO: 1885791 - DNA, 15 bp, Homo sapiens
tgtcactgaacttac

SEQ ID NO: 1885792 - DNA, 15 bp, Homo sapiens
gtcactgaacttacg

SEQ ID NO: 1885793 - DNA, 15 bp, Homo sapiens
tcactgaacttacgc

SEQ ID NO: 1885794 - DNA, 15 bp, Homo sapiens
cactgaacttacgcg

SEQ ID NO: 1885795 - DNA, 15 bp, Homo sapiens
actgaacttacgcgt

SEQ ID NO: 1885796 - DNA, 15 bp, Homo sapiens
ctgaacttacgcgta

SEQ ID NO: 1885797 - DNA, 15 bp, Homo sapiens
gaacttacgcgtaac

SEQ ID NO: 1885798 - DNA, 15 bp, Homo sapiens
aacttacgcgtaaca

SEQ ID NO: 1885799 - DNA, 15 bp, Homo sapiens
acttacgcgtaacat

SEQ ID NO: 1885800 - DNA, 15 bp, Homo sapiens
cttacgcgtaacatt

SEQ ID NO: 1885801 - DNA, 15 bp, Homo sapiens
ttacgcgtaacattt

SEQ ID NO: 1885802 - DNA, 15 bp, Homo sapiens
tacgcgtaacatttt

SEQ ID NO: 1885803 - DNA, 15 bp, Homo sapiens
acgcgtaacattttc

SEQ ID NO: 1885804 - DNA, 15 bp, Homo sapiens
cgcgtaacattttca

SEQ ID NO: 1885805 - DNA, 15 bp, Homo sapiens
gcgtaacattttcat

SEQ ID NO: 1885806 - DNA, 15 bp, Homo sapiens
cgtaacattttcata

SEQ ID NO: 1885807 - DNA, 15 bp, Homo sapiens
gtaacattttcatat

SEQ ID NO: 1885808 - DNA, 15 bp, Homo sapiens
taacattttcatatt

SEQ ID NO: 1885809 - DNA, 15 bp, Homo sapiens
aacattttcatattt

SEQ ID NO: 1885810 - DNA, 15 bp, Homo sapiens
acattttcatatttc

SEQ ID NO: 1885811 - DNA, 15 bp, Homo sapiens
cattttcatatttct

SEQ ID NO: 1885812 - DNA, 15 bp, Homo sapiens
attttcatatttctc

SEQ ID NO: 1885813 - DNA, 15 bp, Homo sapiens
ttttcatatttctct

SEQ ID NO: 1885814 - DNA, 15 bp, Homo sapiens
tttcatatttctctt

SEQ ID NO: 1885815 - DNA, 15 bp, Homo sapiens
ttcatatttctcttt

SEQ ID NO: 1885816 - DNA, 15 bp, Homo sapiens
tcatatttctctttg

SEQ ID NO: 1885817 - DNA, 15 bp, Homo sapiens
catatttctctttgt

SEQ ID NO: 1885818 - DNA, 15 bp, Homo sapiens
atatttctctttgtt

SEQ ID NO: 1885819 - DNA, 15 bp, Homo sapiens
tatttctctttgttg

SEQ ID NO: 1885820 - DNA, 15 bp, Homo sapiens
atttctctttgttgc

SEQ ID NO: 1885821 - DNA, 15 bp, Homo sapiens
tttctctttgttgca

SEQ ID NO: 1885822 - DNA, 15 bp, Homo sapiens
ttctctttgttgcag

SEQ ID NO: 1885823 - DNA, 15 bp, Homo sapiens
tctctttgttgcaga

SEQ ID NO: 1885824 - DNA, 15 bp, Homo sapiens
ctctttgttgcagaa

SEQ ID NO: 1885825 - DNA, 15 bp, Homo sapiens
tctttgttgcagaat

SEQ ID NO: 1885826 - DNA, 15 bp, Homo sapiens
ctttgttgcagaatg

SEQ ID NO: 1885827 - DNA, 15 bp, Homo sapiens
tttgttgcagaatgc

SEQ ID NO: 1885828 - DNA, 15 bp, Homo sapiens
ttgttgcagaatgca

SEQ ID NO: 1885829 - DNA, 15 bp, Homo sapiens
tgttgcagaatgcaa

SEQ ID NO: 1885830 - DNA, 15 bp, Homo sapiens
gttgcagaatgcaaa

SEQ ID NO: 1885831 - DNA, 15 bp, Homo sapiens
ttgcagaatgcaaag

SEQ ID NO: 1885832 - DNA, 15 bp, Homo sapiens
tgcagaatgcaaagt

SEQ ID NO: 1885833 - DNA, 15 bp, Homo sapiens
gcagaatgcaaagta

SEQ ID NO: 1885834 - DNA, 15 bp, Homo sapiens
cagaatgcaaagtat

SEQ ID NO: 1885835 - DNA, 15 bp, Homo sapiens
agaatgcaaagtatg

SEQ ID NO: 1885836 - DNA, 15 bp, Homo sapiens
gaatgcaaagtatgg

SEQ ID NO: 1885837 - DNA, 15 bp, Homo sapiens
aatgcaaagtatggc

SEQ ID NO: 1885838 - DNA, 15 bp, Homo sapiens
atgcaaagtatggcg

SEQ ID NO: 1885839 - DNA, 15 bp, Homo sapiens
tgcaaagtatggcga

SEQ ID NO: 1885840 - DNA, 15 bp, Homo sapiens
gcaaagtatggcgaa

SEQ ID NO: 1885841 - DNA, 15 bp, Homo sapiens
caaagtatggcgaaa

SEQ ID NO: 1885842 - DNA, 15 bp, Homo sapiens
aaagtatggcgaaat

SEQ ID NO: 1885843 - DNA, 15 bp, Homo sapiens
aagtatggcgaaatc

SEQ ID NO: 1885844 - DNA, 15 bp, Homo sapiens
agtatggcgaaatcc

SEQ ID NO: 1885845 - DNA, 15 bp, Homo sapiens
gtatggcgaaatcca

SEQ ID NO: 1885846 - DNA, 15 bp, Homo sapiens
tatggcgaaatccac

SEQ ID NO: 1885847 - DNA, 15 bp, Homo sapiens
atggcgaaatccact

SEQ ID NO: 1885848 - DNA, 15 bp, Homo sapiens
tggcgaaatccacta

SEQ ID NO: 1885849 - DNA, 15 bp, Homo sapiens
ggcgaaatccactaa

SEQ ID NO: 1885850 - DNA, 15 bp, Homo sapiens
gcgaaatccactaaa

SEQ ID NO: 1885851 - DNA, 15 bp, Homo sapiens
cgaaatccactaaat

SEQ ID NO: 1885852 - DNA, 15 bp, Homo sapiens
gaaatccactaaatt

SEQ ID NO: 1885853 - DNA, 15 bp, Homo sapiens
aaatccactaaattt

SEQ ID NO: 1885854 - DNA, 15 bp, Homo sapiens
aatccactaaattta

SEQ ID NO: 1885855 - DNA, 15 bp, Homo sapiens
atccactaaatttat

SEQ ID NO: 1885856 - DNA, 15 bp, Homo sapiens
tccactaaatttatt

SEQ ID NO: 1885857 - DNA, 15 bp, Homo sapiens
ccactaaatttattt

SEQ ID NO: 1885858 - DNA, 15 bp, Homo sapiens
cactaaatttattta

SEQ ID NO: 1885859 - DNA, 15 bp, Homo sapiens
actaaatttatttag

SEQ ID NO: 1885860 - DNA, 15 bp, Homo sapiens
ctaaatttatttagg

SEQ ID NO: 1885861 - DNA, 15 bp, Homo sapiens
taaatttatttaggg

SEQ ID NO: 1885862 - DNA, 15 bp, Homo sapiens
aaatttatttagggg

SEQ ID NO: 1885863 - DNA, 15 bp, Homo sapiens
aatttatttaggggt

SEQ ID NO: 1885864 - DNA, 15 bp, Homo sapiens
atttatttaggggtg

SEQ ID NO: 1885865 - DNA, 15 bp, Homo sapiens
tttatttaggggtgc

SEQ ID NO: 1885866 - DNA, 15 bp, Homo sapiens
ttatttaggggtgct

SEQ ID NO: 1885867 - DNA, 15 bp, Homo sapiens
tatttaggggtgctg

SEQ ID NO: 1885868 - DNA, 15 bp, Homo sapiens
atttaggggtgctga

SEQ ID NO: 1885869 - DNA, 15 bp, Homo sapiens
tttaggggtgctgaa

SEQ ID NO: 1885870 - DNA, 15 bp, Homo sapiens
ttaggggtgctgaat

SEQ ID NO: 1885871 - DNA, 15 bp, Homo sapiens
taggggtgctgaata

SEQ ID NO: 1885872 - DNA, 15 bp, Homo sapiens
aggggtgctgaatac

SEQ ID NO: 1885873 - DNA, 15 bp, Homo sapiens
ggggtgctgaataca

SEQ ID NO: 1885874 - DNA, 15 bp, Homo sapiens
gggtgctgaatacaa

SEQ ID NO: 1885875 - DNA, 15 bp, Homo sapiens
ggtgctgaatacaat

SEQ ID NO: 1885876 - DNA, 15 bp, Homo sapiens
gtgctgaatacaatc

SEQ ID NO: 1885877 - DNA, 15 bp, Homo sapiens
tgctgaatacaatcg

SEQ ID NO: 1885878 - DNA, 15 bp, Homo sapiens
gctgaatacaatcgg

SEQ ID NO: 1885879 - DNA, 15 bp, Homo sapiens
ctgaatacaatcggt

SEQ ID NO: 1885880 - DNA, 15 bp, Homo sapiens
tgaatacaatcggta

SEQ ID NO: 1885881 - DNA, 15 bp, Homo sapiens
gaatacaatcggtaa

SEQ ID NO: 1885882 - DNA, 15 bp, Homo sapiens
aatacaatcggtaag

SEQ ID NO: 1885883 - DNA, 15 bp, Homo sapiens
atacaatcggtaagc

SEQ ID NO: 1885884 - DNA, 15 bp, Homo sapiens
tacaatcggtaagca

SEQ ID NO: 1885885 - DNA, 15 bp, Homo sapiens
acaatcggtaagcat

SEQ ID NO: 1885886 - DNA, 15 bp, Homo sapiens
caatcggtaagcatt

SEQ ID NO: 1885887 - DNA, 15 bp, Homo sapiens
aatcggtaagcattt

SEQ ID NO: 1885888 - DNA, 15 bp, Homo sapiens
atcggtaagcatttt

SEQ ID NO: 1885889 - DNA, 15 bp, Homo sapiens
tcggtaagcattttg

SEQ ID NO: 1885890 - DNA, 15 bp, Homo sapiens
cggtaagcattttga

SEQ ID NO: 1885891 - DNA, 15 bp, Homo sapiens
ggtaagcattttgac

SEQ ID NO: 1885892 - DNA, 15 bp, Homo sapiens
gtaagcattttgaca

SEQ ID NO: 1885893 - DNA, 15 bp, Homo sapiens
taagcattttgacag

SEQ ID NO: 1885894 - DNA, 15 bp, Homo sapiens
aagcattttgacagc

SEQ ID NO: 1885895 - DNA, 15 bp, Homo sapiens
agcattttgacagct

SEQ ID NO: 1885896 - DNA, 15 bp, Homo sapiens
gcattttgacagctt

SEQ ID NO: 1885897 - DNA, 15 bp, Homo sapiens
cattttgacagcttg

SEQ ID NO: 1885898 - DNA, 15 bp, Homo sapiens
attttgacagcttgg

SEQ ID NO: 1885899 - DNA, 15 bp, Homo sapiens
ttttgacagcttggg

SEQ ID NO: 1885900 - DNA, 15 bp, Homo sapiens
tttgacagcttggga

SEQ ID NO: 1885901 - DNA, 15 bp, Homo sapiens
ttgacagcttgggaa

SEQ ID NO: 1885902 - DNA, 15 bp, Homo sapiens
tgacagcttgggaaa

SEQ ID NO: 1885903 - DNA, 15 bp, Homo sapiens
gacagcttgggaaac

SEQ ID NO: 1885904 - DNA, 15 bp, Homo sapiens
acagcttgggaaaca

SEQ ID NO: 1885905 - DNA, 15 bp, Homo sapiens
cagcttgggaaacaa

SEQ ID NO: 1885906 - DNA, 15 bp, Homo sapiens
agcttgggaaacaaa

SEQ ID NO: 1885907 - DNA, 15 bp, Homo sapiens
gcttgggaaacaaat

SEQ ID NO: 1885908 - DNA, 15 bp, Homo sapiens
cttgggaaacaaatg

SEQ ID NO: 1885909 - DNA, 15 bp, Homo sapiens
ttgggaaacaaatgg

SEQ ID NO: 1885910 - DNA, 15 bp, Homo sapiens
tgggaaacaaatggg

SEQ ID NO: 1885911 - DNA, 15 bp, Homo sapiens
gggaaacaaatgggt

SEQ ID NO: 1885912 - DNA, 15 bp, Homo sapiens
ggaaacaaatgggtc

SEQ ID NO: 1885913 - DNA, 15 bp, Homo sapiens
gaaacaaatgggtct

SEQ ID NO: 1885914 - DNA, 15 bp, Homo sapiens
aaacaaatgggtctg

SEQ ID NO: 1885915 - DNA, 15 bp, Homo sapiens
aacaaatgggtctgg

SEQ ID NO: 1885916 - DNA, 15 bp, Homo sapiens
acaaatgggtctggt

SEQ ID NO: 1885917 - DNA, 15 bp, Homo sapiens
caaatgggtctggtt

SEQ ID NO: 1885918 - DNA, 15 bp, Homo sapiens
aaatgggtctggttc

SEQ ID NO: 1885919 - DNA, 15 bp, Homo sapiens
aatgggtctggttca

SEQ ID NO: 1885920 - DNA, 15 bp, Homo sapiens
atgggtctggttcag

SEQ ID NO: 1885921 - DNA, 15 bp, Homo sapiens
tgggtctggttcaga

SEQ ID NO: 1885922 - DNA, 15 bp, Homo sapiens
gggtctggttcagag

SEQ ID NO: 1885923 - DNA, 15 bp, Homo sapiens
ggtctggttcagaga

SEQ ID NO: 1885924 - DNA, 15 bp, Homo sapiens
gtctggttcagagag

SEQ ID NO: 1885925 - DNA, 15 bp, Homo sapiens
tctggttcagagagc

SEQ ID NO: 1885926 - DNA, 15 bp, Homo sapiens
ctggttcagagagca

SEQ ID NO: 1885927 - DNA, 15 bp, Homo sapiens
tggttcagagagcaa

SEQ ID NO: 1885928 - DNA, 15 bp, Homo sapiens
ggttcagagagcaaa

SEQ ID NO: 1885929 - DNA, 15 bp, Homo sapiens
gttcagagagcaaag

SEQ ID NO: 1885930 - DNA, 15 bp, Homo sapiens
ttcagagagcaaaga

SEQ ID NO: 1885931 - DNA, 15 bp, Homo sapiens
tcagagagcaaagac

SEQ ID NO: 1885932 - DNA, 15 bp, Homo sapiens
cagagagcaaagaca

SEQ ID NO: 1885933 - DNA, 15 bp, Homo sapiens
agagagcaaagacag

SEQ ID NO: 1885934 - DNA, 15 bp, Homo sapiens
gagagcaaagacagc

SEQ ID NO: 1885935 - DNA, 15 bp, Homo sapiens
agagcaaagacagca

SEQ ID NO: 1885936 - DNA, 15 bp, Homo sapiens
gagcaaagacagcag

SEQ ID NO: 1885937 - DNA, 15 bp, Homo sapiens
agcaaagacagcagc

SEQ ID NO: 1885938 - DNA, 15 bp, Homo sapiens
gcaaagacagcagca

SEQ ID NO: 1885939 - DNA, 15 bp, Homo sapiens
caaagacagcagcaa

SEQ ID NO: 1885940 - DNA, 15 bp, Homo sapiens
aaagacagcagcaaa

SEQ ID NO: 1885941 - DNA, 15 bp, Homo sapiens
aagacagcagcaaat

SEQ ID NO: 1885942 - DNA, 15 bp, Homo sapiens
agacagcagcaaatg

SEQ ID NO: 1885943 - DNA, 15 bp, Homo sapiens
gacagcagcaaatgt

SEQ ID NO: 1885944 - DNA, 15 bp, Homo sapiens
acagcagcaaatgtt

SEQ ID NO: 1885945 - DNA, 15 bp, Homo sapiens
cagcagcaaatgttt

SEQ ID NO: 1885946 - DNA, 15 bp, Homo sapiens
agcagcaaatgtttt

SEQ ID NO: 1885947 - DNA, 15 bp, Homo sapiens
gcagcaaatgttttt

SEQ ID NO: 1885948 - DNA, 15 bp, Homo sapiens
cagcaaatgtttttg

SEQ ID NO: 1885949 - DNA, 15 bp, Homo sapiens
agcaaatgtttttgc

SEQ ID NO: 1885950 - DNA, 15 bp, Homo sapiens
gcaaatgtttttgct

SEQ ID NO: 1885951 - DNA, 15 bp, Homo sapiens
caaatgtttttgctg

SEQ ID NO: 1885952 - DNA, 15 bp, Homo sapiens
aaatgtttttgctgg

SEQ ID NO: 1885953 - DNA, 15 bp, Homo sapiens
aatgtttttgctggt

SEQ ID NO: 1885954 - DNA, 15 bp, Homo sapiens
atgtttttgctggtt

SEQ ID NO: 1885955 - DNA, 15 bp, Homo sapiens
tgtttttgctggttc

SEQ ID NO: 1885956 - DNA, 15 bp, Homo sapiens
gtttttgctggttca

SEQ ID NO: 1885957 - DNA, 15 bp, Homo sapiens
tttttgctggttcat

SEQ ID NO: 1885958 - DNA, 15 bp, Homo sapiens
ttttgctggttcatt

SEQ ID NO: 1885959 - DNA, 15 bp, Homo sapiens
tttgctggttcattt

SEQ ID NO: 1885960 - DNA, 15 bp, Homo sapiens
ttgctggttcattta

SEQ ID NO: 1885961 - DNA, 15 bp, Homo sapiens
tgctggttcatttag

SEQ ID NO: 1885962 - DNA, 15 bp, Homo sapiens
gctggttcatttagg

SEQ ID NO: 1885963 - DNA, 15 bp, Homo sapiens
ctggttcatttaggg

SEQ ID NO: 1885964 - DNA, 15 bp, Homo sapiens
tggttcatttagggg

SEQ ID NO: 1885965 - DNA, 15 bp, Homo sapiens
ggttcatttaggggt

SEQ ID NO: 1885966 - DNA, 15 bp, Homo sapiens
gttcatttaggggtc

SEQ ID NO: 1885967 - DNA, 15 bp, Homo sapiens
ttcatttaggggtca

SEQ ID NO: 1885968 - DNA, 15 bp, Homo sapiens
tcatttaggggtcat

SEQ ID NO: 1885969 - DNA, 15 bp, Homo sapiens
catttaggggtcatt

SEQ ID NO: 1885970 - DNA, 15 bp, Homo sapiens
atttaggggtcattg

SEQ ID NO: 1885971 - DNA, 15 bp, Homo sapiens
tttaggggtcattgt

SEQ ID NO: 1885972 - DNA, 15 bp, Homo sapiens
ttaggggtcattgta

SEQ ID NO: 1885973 - DNA, 15 bp, Homo sapiens
taggggtcattgtaa

SEQ ID NO: 1885974 - DNA, 15 bp, Homo sapiens
aggggtcattgtaac

SEQ ID NO: 1885975 - DNA, 15 bp, Homo sapiens
ggggtcattgtaaca

SEQ ID NO: 1885976 - DNA, 15 bp, Homo sapiens
gggtcattgtaacag

SEQ ID NO: 1885977 - DNA, 15 bp, Homo sapiens
ggtcattgtaacagt

SEQ ID NO: 1885978 - DNA, 15 bp, Homo sapiens
gtcattgtaacagtc

SEQ ID NO: 1885979 - DNA, 15 bp, Homo sapiens
tcattgtaacagtct

SEQ ID NO: 1885980 - DNA, 15 bp, Homo sapiens
cattgtaacagtcta

SEQ ID NO: 1885981 - DNA, 15 bp, Homo sapiens
attgtaacagtctat

SEQ ID NO: 1885982 - DNA, 15 bp, Homo sapiens
ttgtaacagtctatg

SEQ ID NO: 1885983 - DNA, 15 bp, Homo sapiens
tgtaacagtctatgt

SEQ ID NO: 1885984 - DNA, 15 bp, Homo sapiens
gtaacagtctatgta

SEQ ID NO: 1885985 - DNA, 15 bp, Homo sapiens
taacagtctatgtag

SEQ ID NO: 1885986 - DNA, 15 bp, Homo sapiens
aacagtctatgtagt

SEQ ID NO: 1885987 - DNA, 15 bp, Homo sapiens
acagtctatgtagtg

SEQ ID NO: 1885988 - DNA, 15 bp, Homo sapiens
cagtctatgtagtgc

SEQ ID NO: 1885989 - DNA, 15 bp, Homo sapiens
agtctatgtagtgcg

SEQ ID NO: 1885990 - DNA, 15 bp, Homo sapiens
gtctatgtagtgcgt

SEQ ID NO: 1885991 - DNA, 15 bp, Homo sapiens
tctatgtagtgcgtc

SEQ ID NO: 1885992 - DNA, 15 bp, Homo sapiens
ctatgtagtgcgtcc

SEQ ID NO: 1885993 - DNA, 15 bp, Homo sapiens
tatgtagtgcgtcca

SEQ ID NO: 1885994 - DNA, 15 bp, Homo sapiens
atgtagtgcgtccat

SEQ ID NO: 1885995 - DNA, 15 bp, Homo sapiens
tgtagtgcgtccatt

SEQ ID NO: 1885996 - DNA, 15 bp, Homo sapiens
gtagtgcgtccattt

SEQ ID NO: 1885997 - DNA, 15 bp, Homo sapiens
tagtgcgtccatttt

SEQ ID NO: 1885998 - DNA, 15 bp, Homo sapiens
agtgcgtccattttt

SEQ ID NO: 1885999 - DNA, 15 bp, Homo sapiens
gtgcgtccatttttt

SEQ ID NO: 1886000 - DNA, 15 bp, Homo sapiens
tgcgtccatttttta

SEQ ID NO: 1886001 - DNA, 15 bp, Homo sapiens
gcgtccattttttaa

SEQ ID NO: 1886002 - DNA, 15 bp, Homo sapiens
cgtccattttttaat

SEQ ID NO: 1886003 - DNA, 15 bp, Homo sapiens
gtccattttttaata

SEQ ID NO: 1886004 - DNA, 15 bp, Homo sapiens
tccattttttaatac

SEQ ID NO: 1886005 - DNA, 15 bp, Homo sapiens
ccattttttaatact

SEQ ID NO: 1886006 - DNA, 15 bp, Homo sapiens
cattttttaatacta

SEQ ID NO: 1886007 - DNA, 15 bp, Homo sapiens
attttttaatactat

SEQ ID NO: 1886008 - DNA, 15 bp, Homo sapiens
ttttttaatactatc

SEQ ID NO: 1886009 - DNA, 15 bp, Homo sapiens
tttttaatactatct

SEQ ID NO: 1886010 - DNA, 15 bp, Homo sapiens
ttttaatactatctt

SEQ ID NO: 1886011 - DNA, 15 bp, Homo sapiens
tttaatactatcttc

SEQ ID NO: 1886012 - DNA, 15 bp, Homo sapiens
ttaatactatcttca

SEQ ID NO: 1886013 - DNA, 15 bp, Homo sapiens
taatactatcttcaa

SEQ ID NO: 1886014 - DNA, 15 bp, Homo sapiens
aatactatcttcaaa

SEQ ID NO: 1886015 - DNA, 15 bp, Homo sapiens
atactatcttcaaat

SEQ ID NO: 1886016 - DNA, 15 bp, Homo sapiens
tactatcttcaaatg

SEQ ID NO: 1886017 - DNA, 15 bp, Homo sapiens
actatcttcaaatgt

SEQ ID NO: 1886018 - DNA, 15 bp, Homo sapiens
ctatcttcaaatgtt

SEQ ID NO: 1886019 - DNA, 15 bp, Homo sapiens
tatcttcaaatgttt

SEQ ID NO: 1886020 - DNA, 15 bp, Homo sapiens
atcttcaaatgtttt

SEQ ID NO: 1886021 - DNA, 15 bp, Homo sapiens
tcttcaaatgttttg

SEQ ID NO: 1886022 - DNA, 15 bp, Homo sapiens
cttcaaatgttttga

SEQ ID NO: 1886023 - DNA, 15 bp, Homo sapiens
ttcaaatgttttgat

SEQ ID NO: 1886024 - DNA, 15 bp, Homo sapiens
tcaaatgttttgatt

SEQ ID NO: 1886025 - DNA, 15 bp, Homo sapiens
caaatgttttgattt

SEQ ID NO: 1886026 - DNA, 15 bp, Homo sapiens
aaatgttttgatttt

SEQ ID NO: 1886027 - DNA, 15 bp, Homo sapiens
aatgttttgattttt

SEQ ID NO: 1886028 - DNA, 15 bp, Homo sapiens
atgttttgatttttc

SEQ ID NO: 1886029 - DNA, 15 bp, Homo sapiens
tgttttgatttttct

SEQ ID NO: 1886030 - DNA, 15 bp, Homo sapiens
gttttgatttttctg

SEQ ID NO: 1886031 - DNA, 15 bp, Homo sapiens
ttttgatttttctgt

SEQ ID NO: 1886032 - DNA, 15 bp, Homo sapiens
tttgatttttctgtt

SEQ ID NO: 1886033 - DNA, 15 bp, Homo sapiens
ttgatttttctgttt

SEQ ID NO: 1886034 - DNA, 15 bp, Homo sapiens
tgatttttctgtttt

SEQ ID NO: 1886035 - DNA, 15 bp, Homo sapiens
gatttttctgtttta

SEQ ID NO: 1886036 - DNA, 15 bp, Homo sapiens
atttttctgttttat

SEQ ID NO: 1886037 - DNA, 15 bp, Homo sapiens
tttttctgttttata

SEQ ID NO: 1886038 - DNA, 15 bp, Homo sapiens
ttttctgttttataa

SEQ ID NO: 1886039 - DNA, 15 bp, Homo sapiens
tttctgttttataaa

SEQ ID NO: 1886040 - DNA, 15 bp, Homo sapiens
ttctgttttataaat

SEQ ID NO: 1886041 - DNA, 15 bp, Homo sapiens
tctgttttataaata

SEQ ID NO: 1886042 - DNA, 15 bp, Homo sapiens
ctgttttataaatat

SEQ ID NO: 1886043 - DNA, 15 bp, Homo sapiens
tgttttataaatatt

SEQ ID NO: 1886044 - DNA, 15 bp, Homo sapiens
ttataaatattttag

SEQ ID NO: 1886045 - DNA, 15 bp, Homo sapiens
tataaatattttagc

SEQ ID NO: 1886046 - DNA, 15 bp, Homo sapiens
ataaatattttagca

SEQ ID NO: 1886047 - DNA, 15 bp, Homo sapiens
taaatattttagcac

SEQ ID NO: 1886048 - DNA, 15 bp, Homo sapiens
aaatattttagcact

SEQ ID NO: 1886049 - DNA, 15 bp, Homo sapiens
aatattttagcacta

SEQ ID NO: 1886050 - DNA, 15 bp, Homo sapiens
atattttagcactag

SEQ ID NO: 1886051 - DNA, 15 bp, Homo sapiens
tattttagcactaga

SEQ ID NO: 1886052 - DNA, 15 bp, Homo sapiens
attttagcactagat

SEQ ID NO: 1886053 - DNA, 15 bp, Homo sapiens
ttttagcactagatt

SEQ ID NO: 1886054 - DNA, 15 bp, Homo sapiens
tttagcactagattt

SEQ ID NO: 1886055 - DNA, 15 bp, Homo sapiens
ttagcactagatttg

SEQ ID NO: 1886056 - DNA, 15 bp, Homo sapiens
tagcactagatttgg

SEQ ID NO: 1886057 - DNA, 15 bp, Homo sapiens
agcactagatttggg

SEQ ID NO: 1886058 - DNA, 15 bp, Homo sapiens
gcactagatttggga

SEQ ID NO: 1886059 - DNA, 15 bp, Homo sapiens
cactagatttgggat

SEQ ID NO: 1886060 - DNA, 15 bp, Homo sapiens
actagatttgggata

SEQ ID NO: 1886061 - DNA, 15 bp, Homo sapiens
ctagatttgggataa

SEQ ID NO: 1886062 - DNA, 15 bp, Homo sapiens
tagatttgggataat

SEQ ID NO: 1886063 - DNA, 15 bp, Homo sapiens
agatttgggataatg

SEQ ID NO: 1886064 - DNA, 15 bp, Homo sapiens
gatttgggataatgt

SEQ ID NO: 1886065 - DNA, 15 bp, Homo sapiens
atttgggataatgta

SEQ ID NO: 1886066 - DNA, 15 bp, Homo sapiens
tttgggataatgtac

SEQ ID NO: 1886067 - DNA, 15 bp, Homo sapiens
ttgggataatgtaca

SEQ ID NO: 1886068 - DNA, 15 bp, Homo sapiens
tgggataatgtacaa

SEQ ID NO: 1886069 - DNA, 15 bp, Homo sapiens
gggataatgtacaaa

SEQ ID NO: 1886070 - DNA, 15 bp, Homo sapiens
ggataatgtacaaaa

SEQ ID NO: 1886071 - DNA, 15 bp, Homo sapiens
gataatgtacaaaaa

SEQ ID NO: 1886072 - DNA, 15 bp, Homo sapiens
ataatgtacaaaaat

SEQ ID NO: 1886073 - DNA, 15 bp, Homo sapiens
taatgtacaaaaatg

SEQ ID NO: 1886074 - DNA, 15 bp, Homo sapiens
aatgtacaaaaatgt

SEQ ID NO: 1886075 - DNA, 15 bp, Homo sapiens
atgtacaaaaatgtg

SEQ ID NO: 1886076 - DNA, 15 bp, Homo sapiens
tgtacaaaaatgtgt

SEQ ID NO: 1886077 - DNA, 15 bp, Homo sapiens
gtacaaaaatgtgta

SEQ ID NO: 1886078 - DNA, 15 bp, Homo sapiens
tacaaaaatgtgtag

SEQ ID NO: 1886079 - DNA, 15 bp, Homo sapiens
acaaaaatgtgtagt

SEQ ID NO: 1886080 - DNA, 15 bp, Homo sapiens
caaaaatgtgtagtt

SEQ ID NO: 1886081 - DNA, 15 bp, Homo sapiens
aaaaatgtgtagttt

SEQ ID NO: 1886082 - DNA, 15 bp, Homo sapiens
aaaatgtgtagtttt

SEQ ID NO: 1886083 - DNA, 15 bp, Homo sapiens
aaatgtgtagttttt

SEQ ID NO: 1886084 - DNA, 15 bp, Homo sapiens
aatgtgtagttttta

SEQ ID NO: 1886085 - DNA, 15 bp, Homo sapiens
atgtgtagtttttag

SEQ ID NO: 1886086 - DNA, 15 bp, Homo sapiens
tgtgtagtttttaga

SEQ ID NO: 1886087 - DNA, 15 bp, Homo sapiens
gtgtagtttttagag

SEQ ID NO: 1886088 - DNA, 15 bp, Homo sapiens
tgtagtttttagagt

SEQ ID NO: 1886089 - DNA, 15 bp, Homo sapiens
gtagtttttagagtt

SEQ ID NO: 1886090 - DNA, 15 bp, Homo sapiens
tagtttttagagttt

SEQ ID NO: 1886091 - DNA, 15 bp, Homo sapiens
agtttttagagtttt

SEQ ID NO: 1886092 - DNA, 15 bp, Homo sapiens
gtttttagagttttt

SEQ ID NO: 1886093 - DNA, 15 bp, Homo sapiens
tttttagagtttttg

SEQ ID NO: 1886094 - DNA, 15 bp, Homo sapiens
ttttagagtttttgt

SEQ ID NO: 1886095 - DNA, 15 bp, Homo sapiens
tttagagtttttgta

SEQ ID NO: 1886096 - DNA, 15 bp, Homo sapiens
ttagagtttttgtat

SEQ ID NO: 1886097 - DNA, 15 bp, Homo sapiens
tagagtttttgtatt

SEQ ID NO: 1886098 - DNA, 15 bp, Homo sapiens
agagtttttgtatta

SEQ ID NO: 1886099 - DNA, 15 bp, Homo sapiens
gagtttttgtattaa

SEQ ID NO: 1886100 - DNA, 15 bp, Homo sapiens
agtttttgtattaac

SEQ ID NO: 1886101 - DNA, 15 bp, Homo sapiens
gtttttgtattaaca

SEQ ID NO: 1886102 - DNA, 15 bp, Homo sapiens
tttttgtattaacag

SEQ ID NO: 1886103 - DNA, 15 bp, Homo sapiens
ttttgtattaacagt

SEQ ID NO: 1886104 - DNA, 15 bp, Homo sapiens
tttgtattaacagtt

SEQ ID NO: 1886105 - DNA, 15 bp, Homo sapiens
ttgtattaacagtta

SEQ ID NO: 1886106 - DNA, 15 bp, Homo sapiens
tgtattaacagttat

SEQ ID NO: 1886107 - DNA, 15 bp, Homo sapiens
gtattaacagttatt

SEQ ID NO: 1886108 - DNA, 15 bp, Homo sapiens
tattaacagttattc

SEQ ID NO: 1886109 - DNA, 15 bp, Homo sapiens
attaacagttattct

SEQ ID NO: 1886110 - DNA, 15 bp, Homo sapiens
ttaacagttattctt

SEQ ID NO: 1886111 - DNA, 15 bp, Homo sapiens
taacagttattcttt

SEQ ID NO: 1886112 - DNA, 15 bp, Homo sapiens
aacagttattctttt

SEQ ID NO: 1886113 - DNA, 15 bp, Homo sapiens
acagttattcttttc

SEQ ID NO: 1886114 - DNA, 15 bp, Homo sapiens
cagttattcttttca

SEQ ID NO: 1886115 - DNA, 15 bp, Homo sapiens
agttattcttttcaa

SEQ ID NO: 1886116 - DNA, 15 bp, Homo sapiens
gttattcttttcaat

SEQ ID NO: 1886117 - DNA, 15 bp, Homo sapiens
ttattcttttcaata

SEQ ID NO: 1886118 - DNA, 15 bp, Homo sapiens
tattcttttcaatat

SEQ ID NO: 1886119 - DNA, 15 bp, Homo sapiens
attcttttcaatata

SEQ ID NO: 1886120 - DNA, 15 bp, Homo sapiens
ttcttttcaatatat

SEQ ID NO: 1886121 - DNA, 15 bp, Homo sapiens
tcttttcaatatata

SEQ ID NO: 1886122 - DNA, 15 bp, Homo sapiens
cttttcaatatatac

SEQ ID NO: 1886123 - DNA, 15 bp, Homo sapiens
ttttcaatatatact

SEQ ID NO: 1886124 - DNA, 15 bp, Homo sapiens
tttcaatatatacta

SEQ ID NO: 1886125 - DNA, 15 bp, Homo sapiens
ttcaatatatactat

SEQ ID NO: 1886126 - DNA, 15 bp, Homo sapiens
tcaatatatactata

SEQ ID NO: 1886127 - DNA, 15 bp, Homo sapiens
caatatatactatac

SEQ ID NO: 1886128 - DNA, 15 bp, Homo sapiens
aatatatactataca

SEQ ID NO: 1886129 - DNA, 15 bp, Homo sapiens
atatatactatacat

SEQ ID NO: 1886130 - DNA, 15 bp, Homo sapiens
tatatactatacatt

SEQ ID NO: 1886131 - DNA, 15 bp, Homo sapiens
atatactatacattg

SEQ ID NO: 1886132 - DNA, 15 bp, Homo sapiens
tatactatacattga

SEQ ID NO: 1886133 - DNA, 15 bp, Homo sapiens
atactatacattgaa

SEQ ID NO: 1886134 - DNA, 15 bp, Homo sapiens
tactatacattgaaa

SEQ ID NO: 1886135 - DNA, 15 bp, Homo sapiens
actatacattgaaaa

SEQ ID NO: 1886136 - DNA, 15 bp, Homo sapiens
ctatacattgaaaac

SEQ ID NO: 1886137 - DNA, 15 bp, Homo sapiens
tatacattgaaaaca

SEQ ID NO: 1886138 - DNA, 15 bp, Homo sapiens
atacattgaaaacat

SEQ ID NO: 1886139 - DNA, 15 bp, Homo sapiens
tacattgaaaacatt

SEQ ID NO: 1886140 - DNA, 15 bp, Homo sapiens
acattgaaaacattt

SEQ ID NO: 1886141 - DNA, 15 bp, Homo sapiens
cattgaaaacatttt

SEQ ID NO: 1886142 - DNA, 15 bp, Homo sapiens
attgaaaacattttg

SEQ ID NO: 1886143 - DNA, 15 bp, Homo sapiens
ttgaaaacattttga

SEQ ID NO: 1886144 - DNA, 15 bp, Homo sapiens
tgaaaacattttgaa

SEQ ID NO: 1886145 - DNA, 15 bp, Homo sapiens
gaaaacattttgaag

SEQ ID NO: 1886146 - DNA, 15 bp, Homo sapiens
aaaacattttgaagc

SEQ ID NO: 1886147 - DNA, 15 bp, Homo sapiens
aaacattttgaagct

SEQ ID NO: 1886148 - DNA, 15 bp, Homo sapiens
aacattttgaagctt

SEQ ID NO: 1886149 - DNA, 15 bp, Homo sapiens
acattttgaagctta

SEQ ID NO: 1886150 - DNA, 15 bp, Homo sapiens
cattttgaagcttac

SEQ ID NO: 1886151 - DNA, 15 bp, Homo sapiens
attttgaagcttacc

SEQ ID NO: 1886152 - DNA, 15 bp, Homo sapiens
ttttgaagcttacct

SEQ ID NO: 1886153 - DNA, 15 bp, Homo sapiens
tttgaagcttacctg

SEQ ID NO: 1886154 - DNA, 15 bp, Homo sapiens
ttgaagcttacctgg

SEQ ID NO: 1886155 - DNA, 15 bp, Homo sapiens
tgaagcttacctgga

SEQ ID NO: 1886156 - DNA, 15 bp, Homo sapiens
gaagcttacctggaa

SEQ ID NO: 1886157 - DNA, 15 bp, Homo sapiens
aagcttacctggaat

SEQ ID NO: 1886158 - DNA, 15 bp, Homo sapiens
agcttacctggaata

SEQ ID NO: 1886159 - DNA, 15 bp, Homo sapiens
gcttacctggaatat

SEQ ID NO: 1886160 - DNA, 15 bp, Homo sapiens
cttacctggaatatg

SEQ ID NO: 1886161 - DNA, 15 bp, Homo sapiens
ttacctggaatatgg

SEQ ID NO: 1886162 - DNA, 15 bp, Homo sapiens
tacctggaatatggt

SEQ ID NO: 1886163 - DNA, 15 bp, Homo sapiens
acctggaatatggtt

SEQ ID NO: 1886164 - DNA, 15 bp, Homo sapiens
cctggaatatggtta

SEQ ID NO: 1886165 - DNA, 15 bp, Homo sapiens
ctggaatatggttat

SEQ ID NO: 1886166 - DNA, 15 bp, Homo sapiens
tggaatatggttata

SEQ ID NO: 1886167 - DNA, 15 bp, Homo sapiens
ggaatatggttatag

SEQ ID NO: 1886168 - DNA, 15 bp, Homo sapiens
gaatatggttataga

SEQ ID NO: 1886169 - DNA, 15 bp, Homo sapiens
aatatggttatagag

SEQ ID NO: 1886170 - DNA, 15 bp, Homo sapiens
atatggttatagaga

SEQ ID NO: 1886171 - DNA, 15 bp, Homo sapiens
tatggttatagagat

SEQ ID NO: 1886172 - DNA, 15 bp, Homo sapiens
atggttatagagatg

SEQ ID NO: 1886173 - DNA, 15 bp, Homo sapiens
tggttatagagatgt

SEQ ID NO: 1886174 - DNA, 15 bp, Homo sapiens
ggttatagagatgtc

SEQ ID NO: 1886175 - DNA, 15 bp, Homo sapiens
gttatagagatgtcg

SEQ ID NO: 1886176 - DNA, 15 bp, Homo sapiens
ttatagagatgtcgc

SEQ ID NO: 1886177 - DNA, 15 bp, Homo sapiens
tatagagatgtcgca

SEQ ID NO: 1886178 - DNA, 15 bp, Homo sapiens
atagagatgtcgcag

SEQ ID NO: 1886179 - DNA, 15 bp, Homo sapiens
tagagatgtcgcaga

SEQ ID NO: 1886180 - DNA, 15 bp, Homo sapiens
agagatgtcgcagaa

SEQ ID NO: 1886181 - DNA, 15 bp, Homo sapiens
gagatgtcgcagaag

SEQ ID NO: 1886182 - DNA, 15 bp, Homo sapiens
agatgtcgcagaagt

SEQ ID NO: 1886183 - DNA, 15 bp, Homo sapiens
gatgtcgcagaagtt

SEQ ID NO: 1886184 - DNA, 15 bp, Homo sapiens
atgtcgcagaagtta

SEQ ID NO: 1886185 - DNA, 15 bp, Homo sapiens
tgtcgcagaagttat

SEQ ID NO: 1886186 - DNA, 15 bp, Homo sapiens
gtcgcagaagttatg

SEQ ID NO: 1886187 - DNA, 15 bp, Homo sapiens
tcgcagaagttatgt

SEQ ID NO: 1886188 - DNA, 15 bp, Homo sapiens
cgcagaagttatgtt

SEQ ID NO: 1886189 - DNA, 15 bp, Homo sapiens
gcagaagttatgttg

SEQ ID NO: 1886190 - DNA, 15 bp, Homo sapiens
cagaagttatgttgg

SEQ ID NO: 1886191 - DNA, 15 bp, Homo sapiens
agaagttatgttgga

SEQ ID NO: 1886192 - DNA, 15 bp, Homo sapiens
gaagttatgttggaa

SEQ ID NO: 1886193 - DNA, 15 bp, Homo sapiens
aagttatgttggaat

SEQ ID NO: 1886194 - DNA, 15 bp, Homo sapiens
agttatgttggaatt

SEQ ID NO: 1886195 - DNA, 15 bp, Homo sapiens
gttatgttggaattt

SEQ ID NO: 1886196 - DNA, 15 bp, Homo sapiens
ttatgttggaattta

SEQ ID NO: 1886197 - DNA, 15 bp, Homo sapiens
tatgttggaatttag

SEQ ID NO: 1886198 - DNA, 15 bp, Homo sapiens
atgttggaatttagt

SEQ ID NO: 1886199 - DNA, 15 bp, Homo sapiens
tgttggaatttagtt

SEQ ID NO: 1886200 - DNA, 15 bp, Homo sapiens
gttggaatttagttt

SEQ ID NO: 1886201 - DNA, 15 bp, Homo sapiens
ttggaatttagttta

SEQ ID NO: 1886202 - DNA, 15 bp, Homo sapiens
tggaatttagtttag

SEQ ID NO: 1886203 - DNA, 15 bp, Homo sapiens
ggaatttagtttagc

SEQ ID NO: 1886204 - DNA, 15 bp, Homo sapiens
gaatttagtttagca

SEQ ID NO: 1886205 - DNA, 15 bp, Homo sapiens
aatttagtttagcaa

SEQ ID NO: 1886206 - DNA, 15 bp, Homo sapiens
atttagtttagcaaa

SEQ ID NO: 1886207 - DNA, 15 bp, Homo sapiens
tttagtttagcaaag

SEQ ID NO: 1886208 - DNA, 15 bp, Homo sapiens
ttagtttagcaaagt

SEQ ID NO: 1886209 - DNA, 15 bp, Homo sapiens
tagtttagcaaagta

SEQ ID NO: 1886210 - DNA, 15 bp, Homo sapiens
agtttagcaaagtaa

SEQ ID NO: 1886211 - DNA, 15 bp, Homo sapiens
gtttagcaaagtaat

SEQ ID NO: 1886212 - DNA, 15 bp, Homo sapiens
tttagcaaagtaatt

SEQ ID NO: 1886213 - DNA, 15 bp, Homo sapiens
ttagcaaagtaatta

SEQ ID NO: 1886214 - DNA, 15 bp, Homo sapiens
tagcaaagtaattag

SEQ ID NO: 1886215 - DNA, 15 bp, Homo sapiens
agcaaagtaattagg

SEQ ID NO: 1886216 - DNA, 15 bp, Homo sapiens
gcaaagtaattaggc

SEQ ID NO: 1886217 - DNA, 15 bp, Homo sapiens
caaagtaattaggca

SEQ ID NO: 1886218 - DNA, 15 bp, Homo sapiens
aaagtaattaggcaa

SEQ ID NO: 1886219 - DNA, 15 bp, Homo sapiens
aagtaattaggcaaa

SEQ ID NO: 1886220 - DNA, 15 bp, Homo sapiens
agtaattaggcaaat

SEQ ID NO: 1886221 - DNA, 15 bp, Homo sapiens
gtaattaggcaaatt

SEQ ID NO: 1886222 - DNA, 15 bp, Homo sapiens
taattaggcaaatta

SEQ ID NO: 1886223 - DNA, 15 bp, Homo sapiens
aattaggcaaattag

SEQ ID NO: 1886224 - DNA, 15 bp, Homo sapiens
attaggcaaattaga

SEQ ID NO: 1886225 - DNA, 15 bp, Homo sapiens
ttaggcaaattagaa

SEQ ID NO: 1886226 - DNA, 15 bp, Homo sapiens
taggcaaattagaat

SEQ ID NO: 1886227 - DNA, 15 bp, Homo sapiens
aggcaaattagaatt

SEQ ID NO: 1886228 - DNA, 15 bp, Homo sapiens
ggcaaattagaattt

SEQ ID NO: 1886229 - DNA, 15 bp, Homo sapiens
gcaaattagaatttt

SEQ ID NO: 1886230 - DNA, 15 bp, Homo sapiens
caaattagaattttc

SEQ ID NO: 1886231 - DNA, 15 bp, Homo sapiens
aaattagaattttca

SEQ ID NO: 1886232 - DNA, 15 bp, Homo sapiens
aattagaattttcat

SEQ ID NO: 1886233 - DNA, 15 bp, Homo sapiens
attagaattttcata

SEQ ID NO: 1886234 - DNA, 15 bp, Homo sapiens
ttagaattttcatag

SEQ ID NO: 1886235 - DNA, 15 bp, Homo sapiens
tagaattttcatagc

SEQ ID NO: 1886236 - DNA, 15 bp, Homo sapiens
agaattttcatagct

SEQ ID NO: 1886237 - DNA, 15 bp, Homo sapiens
gaattttcatagctt

SEQ ID NO: 1886238 - DNA, 15 bp, Homo sapiens
aattttcatagcttt

SEQ ID NO: 1886239 - DNA, 15 bp, Homo sapiens
attttcatagcttta

SEQ ID NO: 1886240 - DNA, 15 bp, Homo sapiens
ttttcatagctttag

SEQ ID NO: 1886241 - DNA, 15 bp, Homo sapiens
tttcatagctttagg

SEQ ID NO: 1886242 - DNA, 15 bp, Homo sapiens
ttcatagctttagga

SEQ ID NO: 1886243 - DNA, 15 bp, Homo sapiens
tcatagctttaggaa

SEQ ID NO: 1886244 - DNA, 15 bp, Homo sapiens
catagctttaggaaa

SEQ ID NO: 1886245 - DNA, 15 bp, Homo sapiens
atagctttaggaaag

SEQ ID NO: 1886246 - DNA, 15 bp, Homo sapiens
tagctttaggaaagt

SEQ ID NO: 1886247 - DNA, 15 bp, Homo sapiens
agctttaggaaagtg

SEQ ID NO: 1886248 - DNA, 15 bp, Homo sapiens
gctttaggaaagtgt

SEQ ID NO: 1886249 - DNA, 15 bp, Homo sapiens
ctttaggaaagtgtc

SEQ ID NO: 1886250 - DNA, 15 bp, Homo sapiens
tttaggaaagtgtct

SEQ ID NO: 1886251 - DNA, 15 bp, Homo sapiens
ttaggaaagtgtcta

SEQ ID NO: 1886252 - DNA, 15 bp, Homo sapiens
taggaaagtgtctat

SEQ ID NO: 1886253 - DNA, 15 bp, Homo sapiens
aggaaagtgtctatt

SEQ ID NO: 1886254 - DNA, 15 bp, Homo sapiens
ggaaagtgtctattc

SEQ ID NO: 1886255 - DNA, 15 bp, Homo sapiens
gaaagtgtctattca

SEQ ID NO: 1886256 - DNA, 15 bp, Homo sapiens
aaagtgtctattcat

SEQ ID NO: 1886257 - DNA, 15 bp, Homo sapiens
aagtgtctattcata

SEQ ID NO: 1886258 - DNA, 15 bp, Homo sapiens
agtgtctattcataa

SEQ ID NO: 1886259 - DNA, 15 bp, Homo sapiens
gtgtctattcataat

SEQ ID NO: 1886260 - DNA, 15 bp, Homo sapiens
tgtctattcataata

SEQ ID NO: 1886261 - DNA, 15 bp, Homo sapiens
gtctattcataatat

SEQ ID NO: 1886262 - DNA, 15 bp, Homo sapiens
tctattcataatatg

SEQ ID NO: 1886263 - DNA, 15 bp, Homo sapiens
ctattcataatatga

SEQ ID NO: 1886264 - DNA, 15 bp, Homo sapiens
tattcataatatgaa

SEQ ID NO: 1886265 - DNA, 15 bp, Homo sapiens
attcataatatgaat

SEQ ID NO: 1886266 - DNA, 15 bp, Homo sapiens
ttcataatatgaatt

SEQ ID NO: 1886267 - DNA, 15 bp, Homo sapiens
cataatatgaattag

SEQ ID NO: 1886268 - DNA, 15 bp, Homo sapiens
ataatatgaattagg

SEQ ID NO: 1886269 - DNA, 15 bp, Homo sapiens
taatatgaattaggg

SEQ ID NO: 1886270 - DNA, 15 bp, Homo sapiens
aatatgaattaggga

SEQ ID NO: 1886271 - DNA, 15 bp, Homo sapiens
atatgaattagggaa

SEQ ID NO: 1886272 - DNA, 15 bp, Homo sapiens
tatgaattagggaag

SEQ ID NO: 1886273 - DNA, 15 bp, Homo sapiens
atgaattagggaagg

SEQ ID NO: 1886274 - DNA, 15 bp, Homo sapiens
tgaattagggaaggt

SEQ ID NO: 1886275 - DNA, 15 bp, Homo sapiens
gaattagggaaggtt

SEQ ID NO: 1886276 - DNA, 15 bp, Homo sapiens
aattagggaaggttt

SEQ ID NO: 1886277 - DNA, 15 bp, Homo sapiens
attagggaaggtttt

SEQ ID NO: 1886278 - DNA, 15 bp, Homo sapiens
ttagggaaggttttc

SEQ ID NO: 1886279 - DNA, 15 bp, Homo sapiens
tagggaaggttttca

SEQ ID NO: 1886280 - DNA, 15 bp, Homo sapiens
agggaaggttttcat

SEQ ID NO: 1886281 - DNA, 15 bp, Homo sapiens
gggaaggttttcatt

SEQ ID NO: 1886282 - DNA, 15 bp, Homo sapiens
ggaaggttttcatta

SEQ ID NO: 1886283 - DNA, 15 bp, Homo sapiens
gaaggttttcattag

SEQ ID NO: 1886284 - DNA, 15 bp, Homo sapiens
aaggttttcattagc

SEQ ID NO: 1886285 - DNA, 15 bp, Homo sapiens
aggttttcattagca

SEQ ID NO: 1886286 - DNA, 15 bp, Homo sapiens
ggttttcattagcaa

SEQ ID NO: 1886287 - DNA, 15 bp, Homo sapiens
gttttcattagcaag

SEQ ID NO: 1886288 - DNA, 15 bp, Homo sapiens
ttttcattagcaagg

SEQ ID NO: 1886289 - DNA, 15 bp, Homo sapiens
tttcattagcaaggg

SEQ ID NO: 1886290 - DNA, 15 bp, Homo sapiens
ttcattagcaagggc

SEQ ID NO: 1886291 - DNA, 15 bp, Homo sapiens
tcattagcaagggct

SEQ ID NO: 1886292 - DNA, 15 bp, Homo sapiens
cattagcaagggcta

SEQ ID NO: 1886293 - DNA, 15 bp, Homo sapiens
attagcaagggctag

SEQ ID NO: 1886294 - DNA, 15 bp, Homo sapiens
ttagcaagggctagt

SEQ ID NO: 1886295 - DNA, 15 bp, Homo sapiens
tagcaagggctagta

SEQ ID NO: 1886296 - DNA, 15 bp, Homo sapiens
agcaagggctagtaa

SEQ ID NO: 1886297 - DNA, 15 bp, Homo sapiens
gcaagggctagtaaa

SEQ ID NO: 1886298 - DNA, 15 bp, Homo sapiens
caagggctagtaaat

SEQ ID NO: 1886299 - DNA, 15 bp, Homo sapiens
aagggctagtaaatt

SEQ ID NO: 1886300 - DNA, 15 bp, Homo sapiens
agggctagtaaattt

SEQ ID NO: 1886301 - DNA, 15 bp, Homo sapiens
gggctagtaaatttt

SEQ ID NO: 1886302 - DNA, 15 bp, Homo sapiens
ggctagtaaatttta

SEQ ID NO: 1886303 - DNA, 15 bp, Homo sapiens
gctagtaaattttaa

SEQ ID NO: 1886304 - DNA, 15 bp, Homo sapiens
ctagtaaattttaag

SEQ ID NO: 1886305 - DNA, 15 bp, Homo sapiens
tagtaaattttaaga

SEQ ID NO: 1886306 - DNA, 15 bp, Homo sapiens
agtaaattttaagac

SEQ ID NO: 1886307 - DNA, 15 bp, Homo sapiens
gtaaattttaagaca

SEQ ID NO: 1886308 - DNA, 15 bp, Homo sapiens
taaattttaagacaa

SEQ ID NO: 1886309 - DNA, 15 bp, Homo sapiens
aaattttaagacaaa

SEQ ID NO: 1886310 - DNA, 15 bp, Homo sapiens
aattttaagacaaaa

SEQ ID NO: 1886311 - DNA, 15 bp, Homo sapiens
attttaagacaaaaa

SEQ ID NO: 1886312 - DNA, 15 bp, Homo sapiens
ttttaagacaaaaac

SEQ ID NO: 1886313 - DNA, 15 bp, Homo sapiens
tttaagacaaaaaca

SEQ ID NO: 1886314 - DNA, 15 bp, Homo sapiens
ttaagacaaaaacac

SEQ ID NO: 1886315 - DNA, 15 bp, Homo sapiens
taagacaaaaacaca

SEQ ID NO: 1886316 - DNA, 15 bp, Homo sapiens
aagacaaaaacacag

SEQ ID NO: 1886317 - DNA, 15 bp, Homo sapiens
agacaaaaacacagg

SEQ ID NO: 1886318 - DNA, 15 bp, Homo sapiens
gacaaaaacacagga

SEQ ID NO: 1886319 - DNA, 15 bp, Homo sapiens
acaaaaacacaggag

SEQ ID NO: 1886320 - DNA, 15 bp, Homo sapiens
caaaaacacaggaga

SEQ ID NO: 1886321 - DNA, 15 bp, Homo sapiens
aaaaacacaggagaa

SEQ ID NO: 1886322 - DNA, 15 bp, Homo sapiens
aaaacacaggagaaa

SEQ ID NO: 1886323 - DNA, 15 bp, Homo sapiens
aaacacaggagaaaa

SEQ ID NO: 1886324 - DNA, 15 bp, Homo sapiens
aacacaggagaaaat

SEQ ID NO: 1886325 - DNA, 15 bp, Homo sapiens
acacaggagaaaatg

SEQ ID NO: 1886326 - DNA, 15 bp, Homo sapiens
cacaggagaaaatgt

SEQ ID NO: 1886327 - DNA, 15 bp, Homo sapiens
acaggagaaaatgtt

SEQ ID NO: 1886328 - DNA, 15 bp, Homo sapiens
caggagaaaatgttt

SEQ ID NO: 1886329 - DNA, 15 bp, Homo sapiens
aggagaaaatgttta

SEQ ID NO: 1886330 - DNA, 15 bp, Homo sapiens
ggagaaaatgtttat

SEQ ID NO: 1886331 - DNA, 15 bp, Homo sapiens
gagaaaatgtttatt

SEQ ID NO: 1886332 - DNA, 15 bp, Homo sapiens
agaaaatgtttattt

SEQ ID NO: 1886333 - DNA, 15 bp, Homo sapiens
aaaatgtttatttct

SEQ ID NO: 1886334 - DNA, 15 bp, Homo sapiens
aaatgtttatttctt

SEQ ID NO: 1886335 - DNA, 15 bp, Homo sapiens
aatgtttatttcttt

SEQ ID NO: 1886336 - DNA, 15 bp, Homo sapiens
atgtttatttctttt

SEQ ID NO: 1886337 - DNA, 15 bp, Homo sapiens
tgtttatttcttttg

SEQ ID NO: 1886338 - DNA, 15 bp, Homo sapiens
gtttatttcttttga

SEQ ID NO: 1886339 - DNA, 15 bp, Homo sapiens
tttatttcttttgac

SEQ ID NO: 1886340 - DNA, 15 bp, Homo sapiens
ttatttcttttgact

SEQ ID NO: 1886341 - DNA, 15 bp, Homo sapiens
tatttcttttgactg

SEQ ID NO: 1886342 - DNA, 15 bp, Homo sapiens
atttcttttgactga

SEQ ID NO: 1886343 - DNA, 15 bp, Homo sapiens
tttcttttgactgat

SEQ ID NO: 1886344 - DNA, 15 bp, Homo sapiens
ttcttttgactgata

SEQ ID NO: 1886345 - DNA, 15 bp, Homo sapiens
tcttttgactgatat

SEQ ID NO: 1886346 - DNA, 15 bp, Homo sapiens
cttttgactgatata

SEQ ID NO: 1886347 - DNA, 15 bp, Homo sapiens
ttttgactgatataa

SEQ ID NO: 1886348 - DNA, 15 bp, Homo sapiens
tttgactgatataat

SEQ ID NO: 1886349 - DNA, 15 bp, Homo sapiens
ttgactgatataatt

SEQ ID NO: 1886350 - DNA, 15 bp, Homo sapiens
tgactgatataattc

SEQ ID NO: 1886351 - DNA, 15 bp, Homo sapiens
gactgatataattcc

SEQ ID NO: 1886352 - DNA, 15 bp, Homo sapiens
actgatataattcct

SEQ ID NO: 1886353 - DNA, 15 bp, Homo sapiens
ctgatataattcctg

SEQ ID NO: 1886354 - DNA, 15 bp, Homo sapiens
tgatataattcctga

SEQ ID NO: 1886355 - DNA, 15 bp, Homo sapiens
gatataattcctgaa

SEQ ID NO: 1886356 - DNA, 15 bp, Homo sapiens
atataattcctgaag

SEQ ID NO: 1886357 - DNA, 15 bp, Homo sapiens
tataattcctgaagg

SEQ ID NO: 1886358 - DNA, 15 bp, Homo sapiens
ataattcctgaaggg

SEQ ID NO: 1886359 - DNA, 15 bp, Homo sapiens
taattcctgaaggga

SEQ ID NO: 1886360 - DNA, 15 bp, Homo sapiens
aattcctgaagggag

SEQ ID NO: 1886361 - DNA, 15 bp, Homo sapiens
attcctgaagggaga

SEQ ID NO: 1886362 - DNA, 15 bp, Homo sapiens
ttcctgaagggagaa

SEQ ID NO: 1886363 - DNA, 15 bp, Homo sapiens
tcctgaagggagaat

SEQ ID NO: 1886364 - DNA, 15 bp, Homo sapiens
cctgaagggagaata

SEQ ID NO: 1886365 - DNA, 15 bp, Homo sapiens
ctgaagggagaataa

SEQ ID NO: 1886366 - DNA, 15 bp, Homo sapiens
tgaagggagaataag

SEQ ID NO: 1886367 - DNA, 15 bp, Homo sapiens
gaagggagaataaga

SEQ ID NO: 1886368 - DNA, 15 bp, Homo sapiens
aagggagaataagat

SEQ ID NO: 1886369 - DNA, 15 bp, Homo sapiens
agggagaataagatg

SEQ ID NO: 1886370 - DNA, 15 bp, Homo sapiens
gggagaataagatga

SEQ ID NO: 1886371 - DNA, 15 bp, Homo sapiens
ggagaataagatgat

SEQ ID NO: 1886372 - DNA, 15 bp, Homo sapiens
gagaataagatgatt

SEQ ID NO: 1886373 - DNA, 15 bp, Homo sapiens
agaataagatgattt

SEQ ID NO: 1886374 - DNA, 15 bp, Homo sapiens
gaataagatgatttt

SEQ ID NO: 1886375 - DNA, 15 bp, Homo sapiens
aataagatgattttt

SEQ ID NO: 1886376 - DNA, 15 bp, Homo sapiens
ataagatgattttta

SEQ ID NO: 1886377 - DNA, 15 bp, Homo sapiens
taagatgatttttaa

SEQ ID NO: 1886378 - DNA, 15 bp, Homo sapiens
aagatgatttttaaa

SEQ ID NO: 1886379 - DNA, 15 bp, Homo sapiens
gatgatttttaaaaa

SEQ ID NO: 1886380 - DNA, 15 bp, Homo sapiens
atgatttttaaaaat

SEQ ID NO: 1886381 - DNA, 15 bp, Homo sapiens
tgatttttaaaaatt

SEQ ID NO: 1886382 - DNA, 15 bp, Homo sapiens
gatttttaaaaattt

SEQ ID NO: 1886383 - DNA, 15 bp, Homo sapiens
tttttaaaaattttt

SEQ ID NO: 1886384 - DNA, 15 bp, Homo sapiens
ttttaaaaatttttt

SEQ ID NO: 1886385 - DNA, 15 bp, Homo sapiens
tttaaaaattttttt

SEQ ID NO: 1886386 - DNA, 15 bp, Homo sapiens
aaaaattttttttat

SEQ ID NO: 1886387 - DNA, 15 bp, Homo sapiens
aaaattttttttatt

SEQ ID NO: 1886388 - DNA, 15 bp, Homo sapiens
aaattttttttattc

SEQ ID NO: 1886389 - DNA, 15 bp, Homo sapiens
aattttttttattca

SEQ ID NO: 1886390 - DNA, 15 bp, Homo sapiens
attttttttattcat

SEQ ID NO: 1886391 - DNA, 15 bp, Homo sapiens
ttttttttattcatt

SEQ ID NO: 1886392 - DNA, 15 bp, Homo sapiens
tttttttattcatta

SEQ ID NO: 1886393 - DNA, 15 bp, Homo sapiens
ttttttattcattag

SEQ ID NO: 1886394 - DNA, 15 bp, Homo sapiens
tttttattcattagc

SEQ ID NO: 1886395 - DNA, 15 bp, Homo sapiens
ttttattcattagca

SEQ ID NO: 1886396 - DNA, 15 bp, Homo sapiens
tttattcattagcaa

SEQ ID NO: 1886397 - DNA, 15 bp, Homo sapiens
ttattcattagcaaa

SEQ ID NO: 1886398 - DNA, 15 bp, Homo sapiens
tattcattagcaaag

SEQ ID NO: 1886399 - DNA, 15 bp, Homo sapiens
attcattagcaaagc

SEQ ID NO: 1886400 - DNA, 15 bp, Homo sapiens
ttcattagcaaagct

SEQ ID NO: 1886401 - DNA, 15 bp, Homo sapiens
tcattagcaaagcta

SEQ ID NO: 1886402 - DNA, 15 bp, Homo sapiens
cattagcaaagctat

SEQ ID NO: 1886403 - DNA, 15 bp, Homo sapiens
attagcaaagctatt

SEQ ID NO: 1886404 - DNA, 15 bp, Homo sapiens
ttagcaaagctattt

SEQ ID NO: 1886405 - DNA, 15 bp, Homo sapiens
tagcaaagctatttt

SEQ ID NO: 1886406 - DNA, 15 bp, Homo sapiens
agcaaagctatttta

SEQ ID NO: 1886407 - DNA, 15 bp, Homo sapiens
gcaaagctattttag

SEQ ID NO: 1886408 - DNA, 15 bp, Homo sapiens
caaagctattttagt

SEQ ID NO: 1886409 - DNA, 15 bp, Homo sapiens
aaagctattttagta

SEQ ID NO: 1886410 - DNA, 15 bp, Homo sapiens
aagctattttagtat

SEQ ID NO: 1886411 - DNA, 15 bp, Homo sapiens
agctattttagtatt

SEQ ID NO: 1886412 - DNA, 15 bp, Homo sapiens
gctattttagtattc

SEQ ID NO: 1886413 - DNA, 15 bp, Homo sapiens
attttagtattcagt

SEQ ID NO: 1886414 - DNA, 15 bp, Homo sapiens
ttttagtattcagtt

SEQ ID NO: 1886415 - DNA, 15 bp, Homo sapiens
tttagtattcagtta

SEQ ID NO: 1886416 - DNA, 15 bp, Homo sapiens
ttagtattcagttaa

SEQ ID NO: 1886417 - DNA, 15 bp, Homo sapiens
tagtattcagttaat

SEQ ID NO: 1886418 - DNA, 15 bp, Homo sapiens
agtattcagttaatg

SEQ ID NO: 1886419 - DNA, 15 bp, Homo sapiens
gtattcagttaatgg

SEQ ID NO: 1886420 - DNA, 15 bp, Homo sapiens
tattcagttaatggt

SEQ ID NO: 1886421 - DNA, 15 bp, Homo sapiens
attcagttaatggtc

SEQ ID NO: 1886422 - DNA, 15 bp, Homo sapiens
ttcagttaatggtct

SEQ ID NO: 1886423 - DNA, 15 bp, Homo sapiens
tcagttaatggtcta

SEQ ID NO: 1886424 - DNA, 15 bp, Homo sapiens
cagttaatggtctat

SEQ ID NO: 1886425 - DNA, 15 bp, Homo sapiens
agttaatggtctata

SEQ ID NO: 1886426 - DNA, 15 bp, Homo sapiens
gttaatggtctatat

SEQ ID NO: 1886427 - DNA, 15 bp, Homo sapiens
ttaatggtctatatt

SEQ ID NO: 1886428 - DNA, 15 bp, Homo sapiens
taatggtctatattt

SEQ ID NO: 1886429 - DNA, 15 bp, Homo sapiens
aatggtctatatttc

SEQ ID NO: 1886430 - DNA, 15 bp, Homo sapiens
atggtctatatttca

SEQ ID NO: 1886431 - DNA, 15 bp, Homo sapiens
tggtctatatttcaa

SEQ ID NO: 1886432 - DNA, 15 bp, Homo sapiens
ggtctatatttcaac

SEQ ID NO: 1886433 - DNA, 15 bp, Homo sapiens
gtctatatttcaacg

SEQ ID NO: 1886434 - DNA, 15 bp, Homo sapiens
tctatatttcaacgc

SEQ ID NO: 1886435 - DNA, 15 bp, Homo sapiens
ctatatttcaacgcc

SEQ ID NO: 1886436 - DNA, 15 bp, Homo sapiens
tatatttcaacgcct

SEQ ID NO: 1886437 - DNA, 15 bp, Homo sapiens
atatttcaacgcctc

SEQ ID NO: 1886438 - DNA, 15 bp, Homo sapiens
tatttcaacgcctct

SEQ ID NO: 1886439 - DNA, 15 bp, Homo sapiens
atttcaacgcctctg

SEQ ID NO: 1886440 - DNA, 15 bp, Homo sapiens
tttcaacgcctctgc

SEQ ID NO: 1886441 - DNA, 15 bp, Homo sapiens
ttcaacgcctctgca

SEQ ID NO: 1886442 - DNA, 15 bp, Homo sapiens
tcaacgcctctgcag

SEQ ID NO: 1886443 - DNA, 15 bp, Homo sapiens
caacgcctctgcagc

SEQ ID NO: 1886444 - DNA, 15 bp, Homo sapiens
aacgcctctgcagct

SEQ ID NO: 1886445 - DNA, 15 bp, Homo sapiens
acgcctctgcagctt

SEQ ID NO: 1886446 - DNA, 15 bp, Homo sapiens
cgcctctgcagctta

SEQ ID NO: 1886447 - DNA, 15 bp, Homo sapiens
gcctctgcagcttaa

SEQ ID NO: 1886448 - DNA, 15 bp, Homo sapiens
cctctgcagcttaat

SEQ ID NO: 1886449 - DNA, 15 bp, Homo sapiens
ctctgcagcttaata

SEQ ID NO: 1886450 - DNA, 15 bp, Homo sapiens
tctgcagcttaatat

SEQ ID NO: 1886451 - DNA, 15 bp, Homo sapiens
ctgcagcttaatatt

SEQ ID NO: 1886452 - DNA, 15 bp, Homo sapiens
tgcagcttaatattt

SEQ ID NO: 1886453 - DNA, 15 bp, Homo sapiens
gcagcttaatatttt

SEQ ID NO: 1886454 - DNA, 15 bp, Homo sapiens
cagcttaatatttta

SEQ ID NO: 1886455 - DNA, 15 bp, Homo sapiens
agcttaatattttat

SEQ ID NO: 1886456 - DNA, 15 bp, Homo sapiens
gcttaatattttata

SEQ ID NO: 1886457 - DNA, 15 bp, Homo sapiens
cttaatattttatag

SEQ ID NO: 1886458 - DNA, 15 bp, Homo sapiens
ttaatattttatagg

SEQ ID NO: 1886459 - DNA, 15 bp, Homo sapiens
taatattttataggt

SEQ ID NO: 1886460 - DNA, 15 bp, Homo sapiens
aatattttataggtc

SEQ ID NO: 1886461 - DNA, 15 bp, Homo sapiens
atattttataggtct

SEQ ID NO: 1886462 - DNA, 15 bp, Homo sapiens
tattttataggtctt

SEQ ID NO: 1886463 - DNA, 15 bp, Homo sapiens
attttataggtcttg

SEQ ID NO: 1886464 - DNA, 15 bp, Homo sapiens
ttttataggtcttgc

SEQ ID NO: 1886465 - DNA, 15 bp, Homo sapiens
tttataggtcttgct

SEQ ID NO: 1886466 - DNA, 15 bp, Homo sapiens
ttataggtcttgctt

SEQ ID NO: 1886467 - DNA, 15 bp, Homo sapiens
tataggtcttgcttt

SEQ ID NO: 1886468 - DNA, 15 bp, Homo sapiens
ataggtcttgctttt

SEQ ID NO: 1886469 - DNA, 15 bp, Homo sapiens
taggtcttgcttttc

SEQ ID NO: 1886470 - DNA, 15 bp, Homo sapiens
aggtcttgcttttct

SEQ ID NO: 1886471 - DNA, 15 bp, Homo sapiens
ggtcttgcttttctc

SEQ ID NO: 1886472 - DNA, 15 bp, Homo sapiens
gtcttgcttttctct

SEQ ID NO: 1886473 - DNA, 15 bp, Homo sapiens
tcttgcttttctctc

SEQ ID NO: 1886474 - DNA, 15 bp, Homo sapiens
cttgcttttctctct

SEQ ID NO: 1886475 - DNA, 15 bp, Homo sapiens
ttgcttttctctctc

SEQ ID NO: 1886476 - DNA, 15 bp, Homo sapiens
tgcttttctctctca

SEQ ID NO: 1886477 - DNA, 15 bp, Homo sapiens
gcttttctctctcaa

SEQ ID NO: 1886478 - DNA, 15 bp, Homo sapiens
cttttctctctcaaa

SEQ ID NO: 1886479 - DNA, 15 bp, Homo sapiens
ttttctctctcaaaa

SEQ ID NO: 1886480 - DNA, 15 bp, Homo sapiens
tttctctctcaaaag

SEQ ID NO: 1886481 - DNA, 15 bp, Homo sapiens
ttctctctcaaaagt

SEQ ID NO: 1886482 - DNA, 15 bp, Homo sapiens
tctctctcaaaagtg

SEQ ID NO: 1886483 - DNA, 15 bp, Homo sapiens
ctctctcaaaagtgt

SEQ ID NO: 1886484 - DNA, 15 bp, Homo sapiens
tctctcaaaagtgtc

SEQ ID NO: 1886485 - DNA, 15 bp, Homo sapiens
ctctcaaaagtgtct

SEQ ID NO: 1886486 - DNA, 15 bp, Homo sapiens
tctcaaaagtgtcta

SEQ ID NO: 1886487 - DNA, 15 bp, Homo sapiens
ctcaaaagtgtctaa

SEQ ID NO: 1886488 - DNA, 15 bp, Homo sapiens
tcaaaagtgtctaat

SEQ ID NO: 1886489 - DNA, 15 bp, Homo sapiens
caaaagtgtctaatc

SEQ ID NO: 1886490 - DNA, 15 bp, Homo sapiens
aaaagtgtctaatca

SEQ ID NO: 1886491 - DNA, 15 bp, Homo sapiens
aaagtgtctaatcat

SEQ ID NO: 1886492 - DNA, 15 bp, Homo sapiens
aagtgtctaatcatc

SEQ ID NO: 1886493 - DNA, 15 bp, Homo sapiens
agtgtctaatcatct

SEQ ID NO: 1886494 - DNA, 15 bp, Homo sapiens
gtgtctaatcatctt

SEQ ID NO: 1886495 - DNA, 15 bp, Homo sapiens
tgtctaatcatctta

SEQ ID NO: 1886496 - DNA, 15 bp, Homo sapiens
gtctaatcatcttat

SEQ ID NO: 1886497 - DNA, 15 bp, Homo sapiens
tctaatcatcttatt

SEQ ID NO: 1886498 - DNA, 15 bp, Homo sapiens
ctaatcatcttattt

SEQ ID NO: 1886499 - DNA, 15 bp, Homo sapiens
taatcatcttatttc

SEQ ID NO: 1886500 - DNA, 15 bp, Homo sapiens
aatcatcttatttct

SEQ ID NO: 1886501 - DNA, 15 bp, Homo sapiens
atcatcttatttctc

SEQ ID NO: 1886502 - DNA, 15 bp, Homo sapiens
tcatcttatttctcc

SEQ ID NO: 1886503 - DNA, 15 bp, Homo sapiens
catcttatttctcct

SEQ ID NO: 1886504 - DNA, 15 bp, Homo sapiens
atcttatttctcctt

SEQ ID NO: 1886505 - DNA, 15 bp, Homo sapiens
tcttatttctccttt

SEQ ID NO: 1886506 - DNA, 15 bp, Homo sapiens
cttatttctcctttg

SEQ ID NO: 1886507 - DNA, 15 bp, Homo sapiens
ttatttctcctttgc

SEQ ID NO: 1886508 - DNA, 15 bp, Homo sapiens
tatttctcctttgca

SEQ ID NO: 1886509 - DNA, 15 bp, Homo sapiens
atttctcctttgcag

SEQ ID NO: 1886510 - DNA, 15 bp, Homo sapiens
tttctcctttgcagg

SEQ ID NO: 1886511 - DNA, 15 bp, Homo sapiens
ttctcctttgcaggt

SEQ ID NO: 1886512 - DNA, 15 bp, Homo sapiens
tctcctttgcaggta

SEQ ID NO: 1886513 - DNA, 15 bp, Homo sapiens
ctcctttgcaggtat

SEQ ID NO: 1886514 - DNA, 15 bp, Homo sapiens
tcctttgcaggtata

SEQ ID NO: 1886515 - DNA, 15 bp, Homo sapiens
cctttgcaggtatac

SEQ ID NO: 1886516 - DNA, 15 bp, Homo sapiens
ctttgcaggtatact

SEQ ID NO: 1886517 - DNA, 15 bp, Homo sapiens
tttgcaggtatactt

SEQ ID NO: 1886518 - DNA, 15 bp, Homo sapiens
ttgcaggtatacttg

SEQ ID NO: 1886519 - DNA, 15 bp, Homo sapiens
tgcaggtatacttgg

SEQ ID NO: 1886520 - DNA, 15 bp, Homo sapiens
gcaggtatacttggg

SEQ ID NO: 1886521 - DNA, 15 bp, Homo sapiens
caggtatacttgggt

SEQ ID NO: 1886522 - DNA, 15 bp, Homo sapiens
aggtatacttgggtg

SEQ ID NO: 1886523 - DNA, 15 bp, Homo sapiens
ggtatacttgggtga

SEQ ID NO: 1886524 - DNA, 15 bp, Homo sapiens
gtatacttgggtgac

SEQ ID NO: 1886525 - DNA, 15 bp, Homo sapiens
tatacttgggtgaca

SEQ ID NO: 1886526 - DNA, 15 bp, Homo sapiens
atacttgggtgacag

SEQ ID NO: 1886527 - DNA, 15 bp, Homo sapiens
tacttgggtgacagg

SEQ ID NO: 1886528 - DNA, 15 bp, Homo sapiens
acttgggtgacagga

SEQ ID NO: 1886529 - DNA, 15 bp, Homo sapiens
cttgggtgacaggac

SEQ ID NO: 1886530 - DNA, 15 bp, Homo sapiens
ttgggtgacaggacg

SEQ ID NO: 1886531 - DNA, 15 bp, Homo sapiens
tgggtgacaggacga

SEQ ID NO: 1886532 - DNA, 15 bp, Homo sapiens
gggtgacaggacgag

SEQ ID NO: 1886533 - DNA, 15 bp, Homo sapiens
ggtgacaggacgaga

SEQ ID NO: 1886534 - DNA, 15 bp, Homo sapiens
gtgacaggacgagag

SEQ ID NO: 1886535 - DNA, 15 bp, Homo sapiens
tgacaggacgagagc

SEQ ID NO: 1886536 - DNA, 15 bp, Homo sapiens
gacaggacgagagcc

SEQ ID NO: 1886537 - DNA, 15 bp, Homo sapiens
acaggacgagagcct

SEQ ID NO: 1886538 - DNA, 15 bp, Homo sapiens
caggacgagagcctc

SEQ ID NO: 1886539 - DNA, 15 bp, Homo sapiens
aggacgagagcctct

SEQ ID NO: 1886540 - DNA, 15 bp, Homo sapiens
ggacgagagcctctt

SEQ ID NO: 1886541 - DNA, 15 bp, Homo sapiens
gacgagagcctctta

SEQ ID NO: 1886542 - DNA, 15 bp, Homo sapiens
acgagagcctcttac

SEQ ID NO: 1886543 - DNA, 15 bp, Homo sapiens
cgagagcctcttact

SEQ ID NO: 1886544 - DNA, 15 bp, Homo sapiens
gagagcctcttactt

SEQ ID NO: 1886545 - DNA, 15 bp, Homo sapiens
agagcctcttactta

SEQ ID NO: 1886546 - DNA, 15 bp, Homo sapiens
gagcctcttacttac

SEQ ID NO: 1886547 - DNA, 15 bp, Homo sapiens
agcctcttacttact

SEQ ID NO: 1886548 - DNA, 15 bp, Homo sapiens
gcctcttacttacta

SEQ ID NO: 1886549 - DNA, 15 bp, Homo sapiens
cctcttacttactat

SEQ ID NO: 1886550 - DNA, 15 bp, Homo sapiens
ctcttacttactatg

SEQ ID NO: 1886551 - DNA, 15 bp, Homo sapiens
tcttacttactatga

SEQ ID NO: 1886552 - DNA, 15 bp, Homo sapiens
cttacttactatgac

SEQ ID NO: 1886553 - DNA, 15 bp, Homo sapiens
ttacttactatgaca

SEQ ID NO: 1886554 - DNA, 15 bp, Homo sapiens
tacttactatgacat

SEQ ID NO: 1886555 - DNA, 15 bp, Homo sapiens
acttactatgacatg

SEQ ID NO: 1886556 - DNA, 15 bp, Homo sapiens
cttactatgacatga

SEQ ID NO: 1886557 - DNA, 15 bp, Homo sapiens
ttactatgacatgaa

SEQ ID NO: 1886558 - DNA, 15 bp, Homo sapiens
tactatgacatgaat

SEQ ID NO: 1886559 - DNA, 15 bp, Homo sapiens
actatgacatgaatc

SEQ ID NO: 1886560 - DNA, 15 bp, Homo sapiens
ctatgacatgaatct

SEQ ID NO: 1886561 - DNA, 15 bp, Homo sapiens
tatgacatgaatctc

SEQ ID NO: 1886562 - DNA, 15 bp, Homo sapiens
atgacatgaatctct

SEQ ID NO: 1886563 - DNA, 15 bp, Homo sapiens
tgacatgaatctctc

SEQ ID NO: 1886564 - DNA, 15 bp, Homo sapiens
gacatgaatctctct

SEQ ID NO: 1886565 - DNA, 15 bp, Homo sapiens
acatgaatctctctg

SEQ ID NO: 1886566 - DNA, 15 bp, Homo sapiens
catgaatctctctgc

SEQ ID NO: 1886567 - DNA, 15 bp, Homo sapiens
atgaatctctctgcc

SEQ ID NO: 1886568 - DNA, 15 bp, Homo sapiens
tgaatctctctgccc

SEQ ID NO: 1886569 - DNA, 15 bp, Homo sapiens
gaatctctctgccca

SEQ ID NO: 1886570 - DNA, 15 bp, Homo sapiens
aatctctctgcccaa

SEQ ID NO: 1886571 - DNA, 15 bp, Homo sapiens
atctctctgcccaag

SEQ ID NO: 1886572 - DNA, 15 bp, Homo sapiens
tctctctgcccaaga

SEQ ID NO: 1886573 - DNA, 15 bp, Homo sapiens
ctctctgcccaagac

SEQ ID NO: 1886574 - DNA, 15 bp, Homo sapiens
tctctgcccaagacc

SEQ ID NO: 1886575 - DNA, 15 bp, Homo sapiens
ctctgcccaagacca

SEQ ID NO: 1886576 - DNA, 15 bp, Homo sapiens
tctgcccaagaccac

SEQ ID NO: 1886577 - DNA, 15 bp, Homo sapiens
ctgcccaagaccacc

SEQ ID NO: 1886578 - DNA, 15 bp, Homo sapiens
tgcccaagaccacca

SEQ ID NO: 1886579 - DNA, 15 bp, Homo sapiens
gcccaagaccaccag

SEQ ID NO: 1886580 - DNA, 15 bp, Homo sapiens
cccaagaccaccaga

SEQ ID NO: 1886581 - DNA, 15 bp, Homo sapiens
ccaagaccaccagac

SEQ ID NO: 1886582 - DNA, 15 bp, Homo sapiens
caagaccaccagaca

SEQ ID NO: 1886583 - DNA, 15 bp, Homo sapiens
aagaccaccagacat

SEQ ID NO: 1886584 - DNA, 15 bp, Homo sapiens
agaccaccagacatt

SEQ ID NO: 1886585 - DNA, 15 bp, Homo sapiens
gaccaccagacattc

SEQ ID NO: 1886586 - DNA, 15 bp, Homo sapiens
accaccagacattct

SEQ ID NO: 1886587 - DNA, 15 bp, Homo sapiens
ccaccagacattctt

SEQ ID NO: 1886588 - DNA, 15 bp, Homo sapiens
caccagacattcttt

SEQ ID NO: 1886589 - DNA, 15 bp, Homo sapiens
accagacattcttta

SEQ ID NO: 1886590 - DNA, 15 bp, Homo sapiens
ccagacattctttac

SEQ ID NO: 1886591 - DNA, 15 bp, Homo sapiens
cagacattctttact

SEQ ID NO: 1886592 - DNA, 15 bp, Homo sapiens
agacattctttactt

SEQ ID NO: 1886593 - DNA, 15 bp, Homo sapiens
gacattctttacttg

SEQ ID NO: 1886594 - DNA, 15 bp, Homo sapiens
acattctttacttgt

SEQ ID NO: 1886595 - DNA, 15 bp, Homo sapiens
cattctttacttgtg

SEQ ID NO: 1886596 - DNA, 15 bp, Homo sapiens
attctttacttgtga

SEQ ID NO: 1886597 - DNA, 15 bp, Homo sapiens
ttctttacttgtgac

SEQ ID NO: 1886598 - DNA, 15 bp, Homo sapiens
tctttacttgtgact

SEQ ID NO: 1886599 - DNA, 15 bp, Homo sapiens
ctttacttgtgactc

SEQ ID NO: 1886600 - DNA, 15 bp, Homo sapiens
tttacttgtgactcg

SEQ ID NO: 1886601 - DNA, 15 bp, Homo sapiens
tctggatggttgaca

SEQ ID NO: 1886602 - DNA, 15 bp, Homo sapiens
ctggatggttgacac

SEQ ID NO: 1886603 - DNA, 15 bp, Homo sapiens
tggatggttgacacc

SEQ ID NO: 1886604 - DNA, 15 bp, Homo sapiens
ggatggttgacaccc

SEQ ID NO: 1886605 - DNA, 15 bp, Homo sapiens
gatggttgacacccc

SEQ ID NO: 1886606 - DNA, 15 bp, Homo sapiens
ggttgacacccccat

SEQ ID NO: 1886607 - DNA, 15 bp, Homo sapiens
gttgacacccccatc

SEQ ID NO: 1886608 - DNA, 15 bp, Homo sapiens
ttgacacccccatca

SEQ ID NO: 1886609 - DNA, 15 bp, Homo sapiens
tgacacccccatcac

SEQ ID NO: 1886610 - DNA, 15 bp, Homo sapiens
gacacccccatcacc

SEQ ID NO: 1886611 - DNA, 15 bp, Homo sapiens
acacccccatcacca

SEQ ID NO: 1886612 - DNA, 15 bp, Homo sapiens
cacccccatcaccac

SEQ ID NO: 1886613 - DNA, 15 bp, Homo sapiens
acccccatcaccaca

SEQ ID NO: 1886614 - DNA, 15 bp, Homo sapiens
cccccatcaccacac

SEQ ID NO: 1886615 - DNA, 15 bp, Homo sapiens
ccccatcaccacact

SEQ ID NO: 1886616 - DNA, 15 bp, Homo sapiens
cccatcaccacactt

SEQ ID NO: 1886617 - DNA, 15 bp, Homo sapiens
ccatcaccacacttt

SEQ ID NO: 1886618 - DNA, 15 bp, Homo sapiens
catcaccacactttc

SEQ ID NO: 1886619 - DNA, 15 bp, Homo sapiens
atcaccacactttct

SEQ ID NO: 1886620 - DNA, 15 bp, Homo sapiens
tcaccacactttctt

SEQ ID NO: 1886621 - DNA, 15 bp, Homo sapiens
caccacactttcttg

SEQ ID NO: 1886622 - DNA, 15 bp, Homo sapiens
accacactttcttgc

SEQ ID NO: 1886623 - DNA, 15 bp, Homo sapiens
ccacactttcttgct

SEQ ID NO: 1886624 - DNA, 15 bp, Homo sapiens
cacactttcttgctt

SEQ ID NO: 1886625 - DNA, 15 bp, Homo sapiens
acactttcttgcttc

SEQ ID NO: 1886626 - DNA, 15 bp, Homo sapiens
cactttcttgcttct

SEQ ID NO: 1886627 - DNA, 15 bp, Homo sapiens
actttcttgcttctg

SEQ ID NO: 1886628 - DNA, 15 bp, Homo sapiens
ctttcttgcttctgt

SEQ ID NO: 1886629 - DNA, 15 bp, Homo sapiens
tttcttgcttctgta

SEQ ID NO: 1886630 - DNA, 15 bp, Homo sapiens
ttcttgcttctgtat

SEQ ID NO: 1886631 - DNA, 15 bp, Homo sapiens
tcttgcttctgtatg

SEQ ID NO: 1886632 - DNA, 15 bp, Homo sapiens
cttgcttctgtatgt

SEQ ID NO: 1886633 - DNA, 15 bp, Homo sapiens
ttgcttctgtatgtg

SEQ ID NO: 1886634 - DNA, 15 bp, Homo sapiens
tgcttctgtatgtgt

SEQ ID NO: 1886635 - DNA, 15 bp, Homo sapiens
gcttctgtatgtgta

SEQ ID NO: 1886636 - DNA, 15 bp, Homo sapiens
cttctgtatgtgtat

SEQ ID NO: 1886637 - DNA, 15 bp, Homo sapiens
ttctgtatgtgtatt

SEQ ID NO: 1886638 - DNA, 15 bp, Homo sapiens
tctgtatgtgtattg

SEQ ID NO: 1886639 - DNA, 15 bp, Homo sapiens
ctgtatgtgtattgt

SEQ ID NO: 1886640 - DNA, 15 bp, Homo sapiens
tgtatgtgtattgtg

SEQ ID NO: 1886641 - DNA, 15 bp, Homo sapiens
gtatgtgtattgtgt

SEQ ID NO: 1886642 - DNA, 15 bp, Homo sapiens
tatgtgtattgtgtt

SEQ ID NO: 1886643 - DNA, 15 bp, Homo sapiens
atgtgtattgtgttg

SEQ ID NO: 1886644 - DNA, 15 bp, Homo sapiens
tgtgtattgtgttgt

SEQ ID NO: 1886645 - DNA, 15 bp, Homo sapiens
gtgtattgtgttgtg

SEQ ID NO: 1886646 - DNA, 15 bp, Homo sapiens
tgtattgtgttgtga

SEQ ID NO: 1886647 - DNA, 15 bp, Homo sapiens
gtattgtgttgtgac

SEQ ID NO: 1886648 - DNA, 15 bp, Homo sapiens
tattgtgttgtgaca

SEQ ID NO: 1886649 - DNA, 15 bp, Homo sapiens
attgtgttgtgacaa

SEQ ID NO: 1886650 - DNA, 15 bp, Homo sapiens
ttgtgttgtgacaag

SEQ ID NO: 1886651 - DNA, 15 bp, Homo sapiens
tgtgttgtgacaagg

SEQ ID NO: 1886652 - DNA, 15 bp, Homo sapiens
gtgttgtgacaagga

SEQ ID NO: 1886653 - DNA, 15 bp, Homo sapiens
tgttgtgacaaggat

SEQ ID NO: 1886654 - DNA, 15 bp, Homo sapiens
gttgtgacaaggatg

SEQ ID NO: 1886655 - DNA, 15 bp, Homo sapiens
ttgtgacaaggatgc

SEQ ID NO: 1886656 - DNA, 15 bp, Homo sapiens
tgtgacaaggatgca

SEQ ID NO: 1886657 - DNA, 15 bp, Homo sapiens
gtgacaaggatgcat

SEQ ID NO: 1886658 - DNA, 15 bp, Homo sapiens
tgacaaggatgcatc

SEQ ID NO: 1886659 - DNA, 15 bp, Homo sapiens
gacaaggatgcatca

SEQ ID NO: 1886660 - DNA, 15 bp, Homo sapiens
acaaggatgcatcat

SEQ ID NO: 1886661 - DNA, 15 bp, Homo sapiens
caaggatgcatcatc

SEQ ID NO: 1886662 - DNA, 15 bp, Homo sapiens
aaggatgcatcatct

SEQ ID NO: 1886663 - DNA, 15 bp, Homo sapiens
aggatgcatcatcta

SEQ ID NO: 1886664 - DNA, 15 bp, Homo sapiens
ggatgcatcatctat

SEQ ID NO: 1886665 - DNA, 15 bp, Homo sapiens
gatgcatcatctata

SEQ ID NO: 1886666 - DNA, 15 bp, Homo sapiens
atgcatcatctatat

SEQ ID NO: 1886667 - DNA, 15 bp, Homo sapiens
tgcatcatctatatc

SEQ ID NO: 1886668 - DNA, 15 bp, Homo sapiens
gcatcatctatatct

SEQ ID NO: 1886669 - DNA, 15 bp, Homo sapiens
catcatctatatctt

SEQ ID NO: 1886670 - DNA, 15 bp, Homo sapiens
atcatctatatcttc

SEQ ID NO: 1886671 - DNA, 15 bp, Homo sapiens
tcatctatatcttcc

SEQ ID NO: 1886672 - DNA, 15 bp, Homo sapiens
catctatatcttcca

SEQ ID NO: 1886673 - DNA, 15 bp, Homo sapiens
atctatatcttccat

SEQ ID NO: 1886674 - DNA, 15 bp, Homo sapiens
tctatatcttccatc

SEQ ID NO: 1886675 - DNA, 15 bp, Homo sapiens
ctatatcttccatcg

SEQ ID NO: 1886676 - DNA, 15 bp, Homo sapiens
tatatcttccatcga

SEQ ID NO: 1886677 - DNA, 15 bp, Homo sapiens
atatcttccatcgag

SEQ ID NO: 1886678 - DNA, 15 bp, Homo sapiens
tatcttccatcgagc

SEQ ID NO: 1886679 - DNA, 15 bp, Homo sapiens
atcttccatcgagct

SEQ ID NO: 1886680 - DNA, 15 bp, Homo sapiens
tcttccatcgagctg

SEQ ID NO: 1886681 - DNA, 15 bp, Homo sapiens
cttccatcgagctga

SEQ ID NO: 1886682 - DNA, 15 bp, Homo sapiens
ttccatcgagctgag

SEQ ID NO: 1886683 - DNA, 15 bp, Homo sapiens
tccatcgagctgagc

SEQ ID NO: 1886684 - DNA, 15 bp, Homo sapiens
ccatcgagctgagca

SEQ ID NO: 1886685 - DNA, 15 bp, Homo sapiens
catcgagctgagcag

SEQ ID NO: 1886686 - DNA, 15 bp, Homo sapiens
atcgagctgagcagt

SEQ ID NO: 1886687 - DNA, 15 bp, Homo sapiens
tcgagctgagcagtc

SEQ ID NO: 1886688 - DNA, 15 bp, Homo sapiens
cgagctgagcagtct

SEQ ID NO: 1886689 - DNA, 15 bp, Homo sapiens
gagctgagcagtctg

SEQ ID NO: 1886690 - DNA, 15 bp, Homo sapiens
agctgagcagtctgt

SEQ ID NO: 1886691 - DNA, 15 bp, Homo sapiens
gctgagcagtctgtt

SEQ ID NO: 1886692 - DNA, 15 bp, Homo sapiens
ctgagcagtctgttc

SEQ ID NO: 1886693 - DNA, 15 bp, Homo sapiens
tgagcagtctgttct

SEQ ID NO: 1886694 - DNA, 15 bp, Homo sapiens
gagcagtctgttctg

SEQ ID NO: 1886695 - DNA, 15 bp, Homo sapiens
agcagtctgttctgt

SEQ ID NO: 1886696 - DNA, 15 bp, Homo sapiens
gcagtctgttctgta

SEQ ID NO: 1886697 - DNA, 15 bp, Homo sapiens
cagtctgttctgtac

SEQ ID NO: 1886698 - DNA, 15 bp, Homo sapiens
agtctgttctgtact

SEQ ID NO: 1886699 - DNA, 15 bp, Homo sapiens
gtctgttctgtactc

SEQ ID NO: 1886700 - DNA, 15 bp, Homo sapiens
tctgttctgtactcc

SEQ ID NO: 1886701 - DNA, 15 bp, Homo sapiens
ctgttctgtactccc

SEQ ID NO: 1886702 - DNA, 15 bp, Homo sapiens
tgttctgtactcccc

SEQ ID NO: 1886703 - DNA, 15 bp, Homo sapiens
gttctgtactcccca

SEQ ID NO: 1886704 - DNA, 15 bp, Homo sapiens
ttctgtactccccaa

SEQ ID NO: 1886705 - DNA, 15 bp, Homo sapiens
tctgtactccccaac

SEQ ID NO: 1886706 - DNA, 15 bp, Homo sapiens
ctgtactccccaacc

SEQ ID NO: 1886707 - DNA, 15 bp, Homo sapiens
tgtactccccaacca

SEQ ID NO: 1886708 - DNA, 15 bp, Homo sapiens
gtactccccaaccat

SEQ ID NO: 1886709 - DNA, 15 bp, Homo sapiens
tactccccaaccatt

SEQ ID NO: 1886710 - DNA, 15 bp, Homo sapiens
actccccaaccatta

SEQ ID NO: 1886711 - DNA, 15 bp, Homo sapiens
ctccccaaccattag

SEQ ID NO: 1886712 - DNA, 15 bp, Homo sapiens
tccccaaccattagc

SEQ ID NO: 1886713 - DNA, 15 bp, Homo sapiens
ccccaaccattagca

SEQ ID NO: 1886714 - DNA, 15 bp, Homo sapiens
cccaaccattagcac

SEQ ID NO: 1886715 - DNA, 15 bp, Homo sapiens
ccaaccattagcact

SEQ ID NO: 1886716 - DNA, 15 bp, Homo sapiens
caaccattagcactt

SEQ ID NO: 1886717 - DNA, 15 bp, Homo sapiens
aaccattagcacttc

SEQ ID NO: 1886718 - DNA, 15 bp, Homo sapiens
accattagcacttct

SEQ ID NO: 1886719 - DNA, 15 bp, Homo sapiens
ccattagcacttcta

SEQ ID NO: 1886720 - DNA, 15 bp, Homo sapiens
cattagcacttctat

SEQ ID NO: 1886721 - DNA, 15 bp, Homo sapiens
attagcacttctatt

SEQ ID NO: 1886722 - DNA, 15 bp, Homo sapiens
ttagcacttctattg

SEQ ID NO: 1886723 - DNA, 15 bp, Homo sapiens
tagcacttctattgc

SEQ ID NO: 1886724 - DNA, 15 bp, Homo sapiens
agcacttctattgct

SEQ ID NO: 1886725 - DNA, 15 bp, Homo sapiens
gcacttctattgctc

SEQ ID NO: 1886726 - DNA, 15 bp, Homo sapiens
cacttctattgctct

SEQ ID NO: 1886727 - DNA, 15 bp, Homo sapiens
acttctattgctctc

SEQ ID NO: 1886728 - DNA, 15 bp, Homo sapiens
cttctattgctctct

SEQ ID NO: 1886729 - DNA, 15 bp, Homo sapiens
ttctattgctctctc

SEQ ID NO: 1886730 - DNA, 15 bp, Homo sapiens
tctattgctctctcc

SEQ ID NO: 1886731 - DNA, 15 bp, Homo sapiens
ctattgctctctcct

SEQ ID NO: 1886732 - DNA, 15 bp, Homo sapiens
tattgctctctcctt

SEQ ID NO: 1886733 - DNA, 15 bp, Homo sapiens
attgctctctccttt

SEQ ID NO: 1886734 - DNA, 15 bp, Homo sapiens
ttgctctctcctttt

SEQ ID NO: 1886735 - DNA, 15 bp, Homo sapiens
tgctctctccttttt

SEQ ID NO: 1886736 - DNA, 15 bp, Homo sapiens
gctctctcctttttc

SEQ ID NO: 1886737 - DNA, 15 bp, Homo sapiens
ctctctcctttttcc

SEQ ID NO: 1886738 - DNA, 15 bp, Homo sapiens
tctctcctttttcct

SEQ ID NO: 1886739 - DNA, 15 bp, Homo sapiens
ctctcctttttcctt

SEQ ID NO: 1886740 - DNA, 15 bp, Homo sapiens
tctcctttttccttc

SEQ ID NO: 1886741 - DNA, 15 bp, Homo sapiens
ctcctttttccttca

SEQ ID NO: 1886742 - DNA, 15 bp, Homo sapiens
tcctttttccttcac

SEQ ID NO: 1886743 - DNA, 15 bp, Homo sapiens
cctttttccttcact

SEQ ID NO: 1886744 - DNA, 15 bp, Homo sapiens
ctttttccttcactc

SEQ ID NO: 1886745 - DNA, 15 bp, Homo sapiens
tttttccttcactca

SEQ ID NO: 1886746 - DNA, 15 bp, Homo sapiens
ttttccttcactcac

SEQ ID NO: 1886747 - DNA, 15 bp, Homo sapiens
tttccttcactcaca

SEQ ID NO: 1886748 - DNA, 15 bp, Homo sapiens
ttccttcactcacaa

SEQ ID NO: 1886749 - DNA, 15 bp, Homo sapiens
tccttcactcacaag

SEQ ID NO: 1886750 - DNA, 15 bp, Homo sapiens
ccttcactcacaagc

SEQ ID NO: 1886751 - DNA, 15 bp, Homo sapiens
cttcactcacaagct

SEQ ID NO: 1886752 - DNA, 15 bp, Homo sapiens
ttcactcacaagctc

SEQ ID NO: 1886753 - DNA, 15 bp, Homo sapiens
tcactcacaagctct

SEQ ID NO: 1886754 - DNA, 15 bp, Homo sapiens
cactcacaagctctt

SEQ ID NO: 1886755 - DNA, 15 bp, Homo sapiens
actcacaagctctta

SEQ ID NO: 1886756 - DNA, 15 bp, Homo sapiens
ctcacaagctcttag

SEQ ID NO: 1886757 - DNA, 15 bp, Homo sapiens
tcacaagctcttagc

SEQ ID NO: 1886758 - DNA, 15 bp, Homo sapiens
cacaagctcttagca

SEQ ID NO: 1886759 - DNA, 15 bp, Homo sapiens
acaagctcttagcat

SEQ ID NO: 1886760 - DNA, 15 bp, Homo sapiens
caagctcttagcatg

SEQ ID NO: 1886761 - DNA, 15 bp, Homo sapiens
aagctcttagcatgt

SEQ ID NO: 1886762 - DNA, 15 bp, Homo sapiens
agctcttagcatgtt

SEQ ID NO: 1886763 - DNA, 15 bp, Homo sapiens
gctcttagcatgttt

SEQ ID NO: 1886764 - DNA, 15 bp, Homo sapiens
ctcttagcatgtttc

SEQ ID NO: 1886765 - DNA, 15 bp, Homo sapiens
tcttagcatgtttct

SEQ ID NO: 1886766 - DNA, 15 bp, Homo sapiens
cttagcatgtttcta

SEQ ID NO: 1886767 - DNA, 15 bp, Homo sapiens
ttagcatgtttctat

SEQ ID NO: 1886768 - DNA, 15 bp, Homo sapiens
tagcatgtttctatc

SEQ ID NO: 1886769 - DNA, 15 bp, Homo sapiens
agcatgtttctatcc

SEQ ID NO: 1886770 - DNA, 15 bp, Homo sapiens
gcatgtttctatccc

SEQ ID NO: 1886771 - DNA, 15 bp, Homo sapiens
catgtttctatccca

SEQ ID NO: 1886772 - DNA, 15 bp, Homo sapiens
atgtttctatcccaa

SEQ ID NO: 1886773 - DNA, 15 bp, Homo sapiens
tgtttctatcccaaa

SEQ ID NO: 1886774 - DNA, 15 bp, Homo sapiens
gtttctatcccaaac

SEQ ID NO: 1886775 - DNA, 15 bp, Homo sapiens
tttctatcccaaact

SEQ ID NO: 1886776 - DNA, 15 bp, Homo sapiens
ttctatcccaaactc

SEQ ID NO: 1886777 - DNA, 15 bp, Homo sapiens
tctatcccaaactca

SEQ ID NO: 1886778 - DNA, 15 bp, Homo sapiens
ctatcccaaactcat

SEQ ID NO: 1886779 - DNA, 15 bp, Homo sapiens
tatcccaaactcatg

SEQ ID NO: 1886780 - DNA, 15 bp, Homo sapiens
atcccaaactcatgc

SEQ ID NO: 1886781 - DNA, 15 bp, Homo sapiens
tcccaaactcatgcg

SEQ ID NO: 1886782 - DNA, 15 bp, Homo sapiens
cccaaactcatgcgt

SEQ ID NO: 1886783 - DNA, 15 bp, Homo sapiens
ccaaactcatgcgtt

SEQ ID NO: 1886784 - DNA, 15 bp, Homo sapiens
caaactcatgcgttt

SEQ ID NO: 1886785 - DNA, 15 bp, Homo sapiens
aaactcatgcgtttc

SEQ ID NO: 1886786 - DNA, 15 bp, Homo sapiens
aactcatgcgtttcc

SEQ ID NO: 1886787 - DNA, 15 bp, Homo sapiens
actcatgcgtttcca

SEQ ID NO: 1886788 - DNA, 15 bp, Homo sapiens
ctcatgcgtttccac

SEQ ID NO: 1886789 - DNA, 15 bp, Homo sapiens
tcatgcgtttccaca

SEQ ID NO: 1886790 - DNA, 15 bp, Homo sapiens
catgcgtttccacat

SEQ ID NO: 1886791 - DNA, 15 bp, Homo sapiens
atgcgtttccacata

SEQ ID NO: 1886792 - DNA, 15 bp, Homo sapiens
tgcgtttccacatag

SEQ ID NO: 1886793 - DNA, 15 bp, Homo sapiens
gcgtttccacataga

SEQ ID NO: 1886794 - DNA, 15 bp, Homo sapiens
cgtttccacatagat

SEQ ID NO: 1886795 - DNA, 15 bp, Homo sapiens
gtttccacatagatg

SEQ ID NO: 1886796 - DNA, 15 bp, Homo sapiens
tttccacatagatgt

SEQ ID NO: 1886797 - DNA, 15 bp, Homo sapiens
ttccacatagatgta

SEQ ID NO: 1886798 - DNA, 15 bp, Homo sapiens
tccacatagatgtat

SEQ ID NO: 1886799 - DNA, 15 bp, Homo sapiens
ccacatagatgtatg

SEQ ID NO: 1886800 - DNA, 15 bp, Homo sapiens
cacatagatgtatgt

SEQ ID NO: 1886801 - DNA, 15 bp, Homo sapiens
acatagatgtatgtt

SEQ ID NO: 1886802 - DNA, 15 bp, Homo sapiens
catagatgtatgttt

SEQ ID NO: 1886803 - DNA, 15 bp, Homo sapiens
atagatgtatgtttc

SEQ ID NO: 1886804 - DNA, 15 bp, Homo sapiens
tagatgtatgtttct

SEQ ID NO: 1886805 - DNA, 15 bp, Homo sapiens
agatgtatgtttctt

SEQ ID NO: 1886806 - DNA, 15 bp, Homo sapiens
gatgtatgtttcttg

SEQ ID NO: 1886807 - DNA, 15 bp, Homo sapiens
atgtatgtttcttgg

SEQ ID NO: 1886808 - DNA, 15 bp, Homo sapiens
tgtatgtttcttggc

SEQ ID NO: 1886809 - DNA, 15 bp, Homo sapiens
gtatgtttcttggcc

SEQ ID NO: 1886810 - DNA, 15 bp, Homo sapiens
tatgtttcttggcca

SEQ ID NO: 1886811 - DNA, 15 bp, Homo sapiens
atgtttcttggccag

SEQ ID NO: 1886812 - DNA, 15 bp, Homo sapiens
tgtttcttggccagt

SEQ ID NO: 1886813 - DNA, 15 bp, Homo sapiens
gtttcttggccagta

SEQ ID NO: 1886814 - DNA, 15 bp, Homo sapiens
tttcttggccagtag

SEQ ID NO: 1886815 - DNA, 15 bp, Homo sapiens
ttcttggccagtagt

SEQ ID NO: 1886816 - DNA, 15 bp, Homo sapiens
tcttggccagtagtg

SEQ ID NO: 1886817 - DNA, 15 bp, Homo sapiens
cttggccagtagtgc

SEQ ID NO: 1886818 - DNA, 15 bp, Homo sapiens
ttggccagtagtgct

SEQ ID NO: 1886819 - DNA, 15 bp, Homo sapiens
tggccagtagtgcta

SEQ ID NO: 1886820 - DNA, 15 bp, Homo sapiens
ggccagtagtgctac

SEQ ID NO: 1886821 - DNA, 15 bp, Homo sapiens
gccagtagtgctact

SEQ ID NO: 1886822 - DNA, 15 bp, Homo sapiens
ccagtagtgctactc

SEQ ID NO: 1886823 - DNA, 15 bp, Homo sapiens
cagtagtgctactct

SEQ ID NO: 1886824 - DNA, 15 bp, Homo sapiens
agtagtgctactctg

SEQ ID NO: 1886825 - DNA, 15 bp, Homo sapiens
gtagtgctactctgc

SEQ ID NO: 1886826 - DNA, 15 bp, Homo sapiens
tagtgctactctgcc

SEQ ID NO: 1886827 - DNA, 15 bp, Homo sapiens
agtgctactctgcct

SEQ ID NO: 1886828 - DNA, 15 bp, Homo sapiens
gtgctactctgcctc

SEQ ID NO: 1886829 - DNA, 15 bp, Homo sapiens
tgctactctgcctct

SEQ ID NO: 1886830 - DNA, 15 bp, Homo sapiens
gctactctgcctctc

SEQ ID NO: 1886831 - DNA, 15 bp, Homo sapiens
ctactctgcctctcc

SEQ ID NO: 1886832 - DNA, 15 bp, Homo sapiens
tactctgcctctcct

SEQ ID NO: 1886833 - DNA, 15 bp, Homo sapiens
actctgcctctcctc

SEQ ID NO: 1886834 - DNA, 15 bp, Homo sapiens
ctctgcctctcctcc

SEQ ID NO: 1886835 - DNA, 15 bp, Homo sapiens
tctgcctctcctcct

SEQ ID NO: 1886836 - DNA, 15 bp, Homo sapiens
ctgcctctcctccta

SEQ ID NO: 1886837 - DNA, 15 bp, Homo sapiens
tgcctctcctcctaa

SEQ ID NO: 1886838 - DNA, 15 bp, Homo sapiens
gcctctcctcctaag

SEQ ID NO: 1886839 - DNA, 15 bp, Homo sapiens
cctctcctcctaaga

SEQ ID NO: 1886840 - DNA, 15 bp, Homo sapiens
ctctcctcctaagaa

SEQ ID NO: 1886841 - DNA, 15 bp, Homo sapiens
tctcctcctaagaat

SEQ ID NO: 1886842 - DNA, 15 bp, Homo sapiens
ctcctcctaagaata

SEQ ID NO: 1886843 - DNA, 15 bp, Homo sapiens
tcctcctaagaatac

SEQ ID NO: 1886844 - DNA, 15 bp, Homo sapiens
cctcctaagaatacc

SEQ ID NO: 1886845 - DNA, 15 bp, Homo sapiens
ctcctaagaatacca

SEQ ID NO: 1886846 - DNA, 15 bp, Homo sapiens
tcctaagaataccat

SEQ ID NO: 1886847 - DNA, 15 bp, Homo sapiens
cctaagaataccatt

SEQ ID NO: 1886848 - DNA, 15 bp, Homo sapiens
ctaagaataccattt

SEQ ID NO: 1886849 - DNA, 15 bp, Homo sapiens
taagaataccatttg

SEQ ID NO: 1886850 - DNA, 15 bp, Homo sapiens
aagaataccatttga

SEQ ID NO: 1886851 - DNA, 15 bp, Homo sapiens
agaataccatttgaa

SEQ ID NO: 1886852 - DNA, 15 bp, Homo sapiens
gaataccatttgaaa

SEQ ID NO: 1886853 - DNA, 15 bp, Homo sapiens
aataccatttgaaat

SEQ ID NO: 1886854 - DNA, 15 bp, Homo sapiens
ataccatttgaaata

SEQ ID NO: 1886855 - DNA, 15 bp, Homo sapiens
taccatttgaaatat

SEQ ID NO: 1886856 - DNA, 15 bp, Homo sapiens
accatttgaaatata

SEQ ID NO: 1886857 - DNA, 15 bp, Homo sapiens
ccatttgaaatataa

SEQ ID NO: 1886858 - DNA, 15 bp, Homo sapiens
catttgaaatataaa

SEQ ID NO: 1886859 - DNA, 15 bp, Homo sapiens
atttgaaatataaat

SEQ ID NO: 1886860 - DNA, 15 bp, Homo sapiens
tttgaaatataaata

SEQ ID NO: 1886861 - DNA, 15 bp, Homo sapiens
ttgaaatataaataa

SEQ ID NO: 1886862 - DNA, 15 bp, Homo sapiens
tgaaatataaataag

SEQ ID NO: 1886863 - DNA, 15 bp, Homo sapiens
gaaatataaataagc

SEQ ID NO: 1886864 - DNA, 15 bp, Homo sapiens
aaatataaataagca

SEQ ID NO: 1886865 - DNA, 15 bp, Homo sapiens
aatataaataagcaa

SEQ ID NO: 1886866 - DNA, 15 bp, Homo sapiens
atataaataagcaaa

SEQ ID NO: 1886867 - DNA, 15 bp, Homo sapiens
tataaataagcaaag

SEQ ID NO: 1886868 - DNA, 15 bp, Homo sapiens
ataaataagcaaagc

SEQ ID NO: 1886869 - DNA, 15 bp, Homo sapiens
taaataagcaaagca

SEQ ID NO: 1886870 - DNA, 15 bp, Homo sapiens
aaataagcaaagcaa

SEQ ID NO: 1886871 - DNA, 15 bp, Homo sapiens
aataagcaaagcaag

SEQ ID NO: 1886872 - DNA, 15 bp, Homo sapiens
ataagcaaagcaagc

SEQ ID NO: 1886873 - DNA, 15 bp, Homo sapiens
taagcaaagcaagca

SEQ ID NO: 1886874 - DNA, 15 bp, Homo sapiens
aagcaaagcaagcaa

SEQ ID NO: 1886875 - DNA, 15 bp, Homo sapiens
agcaaagcaagcaag

SEQ ID NO: 1886876 - DNA, 15 bp, Homo sapiens
gcaaagcaagcaagc

SEQ ID NO: 1886877 - DNA, 15 bp, Homo sapiens
caaagcaagcaagct

SEQ ID NO: 1886878 - DNA, 15 bp, Homo sapiens
aaagcaagcaagcta

SEQ ID NO: 1886879 - DNA, 15 bp, Homo sapiens
aagcaagcaagctag

SEQ ID NO: 1886880 - DNA, 15 bp, Homo sapiens
agcaagcaagctagc

SEQ ID NO: 1886881 - DNA, 15 bp, Homo sapiens
gcaagcaagctagcc

SEQ ID NO: 1886882 - DNA, 15 bp, Homo sapiens
caagcaagctagccc

SEQ ID NO: 1886883 - DNA, 15 bp, Homo sapiens
aagcaagctagcccc

SEQ ID NO: 1886884 - DNA, 15 bp, Homo sapiens
agcaagctagcccca

SEQ ID NO: 1886885 - DNA, 15 bp, Homo sapiens
gcaagctagccccaa

SEQ ID NO: 1886886 - DNA, 15 bp, Homo sapiens
caagctagccccaac

SEQ ID NO: 1886887 - DNA, 15 bp, Homo sapiens
aagctagccccaacc

SEQ ID NO: 1886888 - DNA, 15 bp, Homo sapiens
agctagccccaacca

SEQ ID NO: 1886889 - DNA, 15 bp, Homo sapiens
gctagccccaaccat

SEQ ID NO: 1886890 - DNA, 15 bp, Homo sapiens
ctagccccaaccatt

SEQ ID NO: 1886891 - DNA, 15 bp, Homo sapiens
tagccccaaccattc

SEQ ID NO: 1886892 - DNA, 15 bp, Homo sapiens
agccccaaccattct

SEQ ID NO: 1886893 - DNA, 15 bp, Homo sapiens
gccccaaccattctt

SEQ ID NO: 1886894 - DNA, 15 bp, Homo sapiens
ccccaaccattcttg

SEQ ID NO: 1886895 - DNA, 15 bp, Homo sapiens
cccaaccattcttgg

SEQ ID NO: 1886896 - DNA, 15 bp, Homo sapiens
ccaaccattcttggg

SEQ ID NO: 1886897 - DNA, 15 bp, Homo sapiens
caaccattcttgggt

SEQ ID NO: 1886898 - DNA, 15 bp, Homo sapiens
aaccattcttgggtt

SEQ ID NO: 1886899 - DNA, 15 bp, Homo sapiens
accattcttgggttc

SEQ ID NO: 1886900 - DNA, 15 bp, Homo sapiens
ccattcttgggttcc

SEQ ID NO: 1886901 - DNA, 15 bp, Homo sapiens
cattcttgggttccc

SEQ ID NO: 1886902 - DNA, 15 bp, Homo sapiens
attcttgggttccca

SEQ ID NO: 1886903 - DNA, 15 bp, Homo sapiens
ttcttgggttcccag

SEQ ID NO: 1886904 - DNA, 15 bp, Homo sapiens
tcttgggttcccagc

SEQ ID NO: 1886905 - DNA, 15 bp, Homo sapiens
cttgggttcccagcc

SEQ ID NO: 1886906 - DNA, 15 bp, Homo sapiens
ttgggttcccagccc

SEQ ID NO: 1886907 - DNA, 15 bp, Homo sapiens
tgggttcccagccca

SEQ ID NO: 1886908 - DNA, 15 bp, Homo sapiens
gggttcccagcccaa

SEQ ID NO: 1886909 - DNA, 15 bp, Homo sapiens
ggttcccagcccaac

SEQ ID NO: 1886910 - DNA, 15 bp, Homo sapiens
gttcccagcccaaca

SEQ ID NO: 1886911 - DNA, 15 bp, Homo sapiens
ttcccagcccaacaa

SEQ ID NO: 1886912 - DNA, 15 bp, Homo sapiens
tcccagcccaacaac

SEQ ID NO: 1886913 - DNA, 15 bp, Homo sapiens
cccagcccaacaact

SEQ ID NO: 1886914 - DNA, 15 bp, Homo sapiens
ccagcccaacaacta

SEQ ID NO: 1886915 - DNA, 15 bp, Homo sapiens
cagcccaacaactac

SEQ ID NO: 1886916 - DNA, 15 bp, Homo sapiens
agcccaacaactaca

SEQ ID NO: 1886917 - DNA, 15 bp, Homo sapiens
gcccaacaactacaa

SEQ ID NO: 1886918 - DNA, 15 bp, Homo sapiens
cccaacaactacaat

SEQ ID NO: 1886919 - DNA, 15 bp, Homo sapiens
ccaacaactacaatc

SEQ ID NO: 1886920 - DNA, 15 bp, Homo sapiens
caacaactacaatct

SEQ ID NO: 1886921 - DNA, 15 bp, Homo sapiens
aacaactacaatctt

SEQ ID NO: 1886922 - DNA, 15 bp, Homo sapiens
acaactacaatctta

SEQ ID NO: 1886923 - DNA, 15 bp, Homo sapiens
caactacaatcttat

SEQ ID NO: 1886924 - DNA, 15 bp, Homo sapiens
aactacaatcttata

SEQ ID NO: 1886925 - DNA, 15 bp, Homo sapiens
actacaatcttatag

SEQ ID NO: 1886926 - DNA, 15 bp, Homo sapiens
ctacaatcttatagc

SEQ ID NO: 1886927 - DNA, 15 bp, Homo sapiens
tacaatcttatagct

SEQ ID NO: 1886928 - DNA, 15 bp, Homo sapiens
acaatcttatagcta

SEQ ID NO: 1886929 - DNA, 15 bp, Homo sapiens
caatcttatagctaa

SEQ ID NO: 1886930 - DNA, 15 bp, Homo sapiens
aatcttatagctaat

SEQ ID NO: 1886931 - DNA, 15 bp, Homo sapiens
atcttatagctaatt

SEQ ID NO: 1886932 - DNA, 15 bp, Homo sapiens
tcttatagctaattc

SEQ ID NO: 1886933 - DNA, 15 bp, Homo sapiens
cttatagctaattcc

SEQ ID NO: 1886934 - DNA, 15 bp, Homo sapiens
ttatagctaattcct

SEQ ID NO: 1886935 - DNA, 15 bp, Homo sapiens
tatagctaattcctc

SEQ ID NO: 1886936 - DNA, 15 bp, Homo sapiens
atagctaattcctct

SEQ ID NO: 1886937 - DNA, 15 bp, Homo sapiens
tagctaattcctctg

SEQ ID NO: 1886938 - DNA, 15 bp, Homo sapiens
agctaattcctctga

SEQ ID NO: 1886939 - DNA, 15 bp, Homo sapiens
gctaattcctctgat

SEQ ID NO: 1886940 - DNA, 15 bp, Homo sapiens
ctaattcctctgata

SEQ ID NO: 1886941 - DNA, 15 bp, Homo sapiens
taattcctctgatac

SEQ ID NO: 1886942 - DNA, 15 bp, Homo sapiens
aattcctctgatact

SEQ ID NO: 1886943 - DNA, 15 bp, Homo sapiens
attcctctgatactg

SEQ ID NO: 1886944 - DNA, 15 bp, Homo sapiens
ttcctctgatactgt

SEQ ID NO: 1886945 - DNA, 15 bp, Homo sapiens
tcctctgatactgta

SEQ ID NO: 1886946 - DNA, 15 bp, Homo sapiens
cctctgatactgtat

SEQ ID NO: 1886947 - DNA, 15 bp, Homo sapiens
ctctgatactgtatc

SEQ ID NO: 1886948 - DNA, 15 bp, Homo sapiens
tctgatactgtatct

SEQ ID NO: 1886949 - DNA, 15 bp, Homo sapiens
ctgatactgtatcta

SEQ ID NO: 1886950 - DNA, 15 bp, Homo sapiens
tgatactgtatctac

SEQ ID NO: 1886951 - DNA, 15 bp, Homo sapiens
gatactgtatctacc

SEQ ID NO: 1886952 - DNA, 15 bp, Homo sapiens
atactgtatctacca

SEQ ID NO: 1886953 - DNA, 15 bp, Homo sapiens
tactgtatctaccac

SEQ ID NO: 1886954 - DNA, 15 bp, Homo sapiens
actgtatctaccact

SEQ ID NO: 1886955 - DNA, 15 bp, Homo sapiens
ctgtatctaccactc

SEQ ID NO: 1886956 - DNA, 15 bp, Homo sapiens
tgtatctaccactca

SEQ ID NO: 1886957 - DNA, 15 bp, Homo sapiens
gtatctaccactcag

SEQ ID NO: 1886958 - DNA, 15 bp, Homo sapiens
tatctaccactcagt

SEQ ID NO: 1886959 - DNA, 15 bp, Homo sapiens
atctaccactcagta

SEQ ID NO: 1886960 - DNA, 15 bp, Homo sapiens
tctaccactcagtat

SEQ ID NO: 1886961 - DNA, 15 bp, Homo sapiens
ctaccactcagtatt

SEQ ID NO: 1886962 - DNA, 15 bp, Homo sapiens
taccactcagtatta

SEQ ID NO: 1886963 - DNA, 15 bp, Homo sapiens
accactcagtattac

SEQ ID NO: 1886964 - DNA, 15 bp, Homo sapiens
ccactcagtattaca

SEQ ID NO: 1886965 - DNA, 15 bp, Homo sapiens
cactcagtattacaa

SEQ ID NO: 1886966 - DNA, 15 bp, Homo sapiens
actcagtattacaat

SEQ ID NO: 1886967 - DNA, 15 bp, Homo sapiens
ctcagtattacaatc

SEQ ID NO: 1886968 - DNA, 15 bp, Homo sapiens
tcagtattacaatct

SEQ ID NO: 1886969 - DNA, 15 bp, Homo sapiens
cagtattacaatctc

SEQ ID NO: 1886970 - DNA, 15 bp, Homo sapiens
agtattacaatctca

SEQ ID NO: 1886971 - DNA, 15 bp, Homo sapiens
gtattacaatctcaa

SEQ ID NO: 1886972 - DNA, 15 bp, Homo sapiens
tattacaatctcaat

SEQ ID NO: 1886973 - DNA, 15 bp, Homo sapiens
attacaatctcaatt

SEQ ID NO: 1886974 - DNA, 15 bp, Homo sapiens
ttacaatctcaattt

SEQ ID NO: 1886975 - DNA, 15 bp, Homo sapiens
tacaatctcaatttt

SEQ ID NO: 1886976 - DNA, 15 bp, Homo sapiens
acaatctcaattttc

SEQ ID NO: 1886977 - DNA, 15 bp, Homo sapiens
caatctcaattttca

SEQ ID NO: 1886978 - DNA, 15 bp, Homo sapiens
aatctcaattttcac

SEQ ID NO: 1886979 - DNA, 15 bp, Homo sapiens
atctcaattttcact

SEQ ID NO: 1886980 - DNA, 15 bp, Homo sapiens
tctcaattttcactt

SEQ ID NO: 1886981 - DNA, 15 bp, Homo sapiens
ctcaattttcacttc

SEQ ID NO: 1886982 - DNA, 15 bp, Homo sapiens
tcaattttcacttca

SEQ ID NO: 1886983 - DNA, 15 bp, Homo sapiens
caattttcacttcat

SEQ ID NO: 1886984 - DNA, 15 bp, Homo sapiens
aattttcacttcatt

SEQ ID NO: 1886985 - DNA, 15 bp, Homo sapiens
attttcacttcatta

SEQ ID NO: 1886986 - DNA, 15 bp, Homo sapiens
ttttcacttcattac

SEQ ID NO: 1886987 - DNA, 15 bp, Homo sapiens
tttcacttcattacc

SEQ ID NO: 1886988 - DNA, 15 bp, Homo sapiens
ttcacttcattaccc

SEQ ID NO: 1886989 - DNA, 15 bp, Homo sapiens
tcacttcattaccct

SEQ ID NO: 1886990 - DNA, 15 bp, Homo sapiens
cacttcattaccctt

SEQ ID NO: 1886991 - DNA, 15 bp, Homo sapiens
acttcattacccttg

SEQ ID NO: 1886992 - DNA, 15 bp, Homo sapiens
cttcattacccttgc

SEQ ID NO: 1886993 - DNA, 15 bp, Homo sapiens
ttcattacccttgcc

SEQ ID NO: 1886994 - DNA, 15 bp, Homo sapiens
tcattacccttgcct

SEQ ID NO: 1886995 - DNA, 15 bp, Homo sapiens
cattacccttgcctc

SEQ ID NO: 1886996 - DNA, 15 bp, Homo sapiens
attacccttgcctca

SEQ ID NO: 1886997 - DNA, 15 bp, Homo sapiens
ttacccttgcctcat

SEQ ID NO: 1886998 - DNA, 15 bp, Homo sapiens
tacccttgcctcata

SEQ ID NO: 1886999 - DNA, 15 bp, Homo sapiens
acccttgcctcatat

SEQ ID NO: 1887000 - DNA, 15 bp, Homo sapiens
cccttgcctcatatt

SEQ ID NO: 1887001 - DNA, 15 bp, Homo sapiens
ccttgcctcatattt

SEQ ID NO: 1887002 - DNA, 15 bp, Homo sapiens
cttgcctcatattta

SEQ ID NO: 1887003 - DNA, 15 bp, Homo sapiens
ttgcctcatatttat

SEQ ID NO: 1887004 - DNA, 15 bp, Homo sapiens
tgcctcatatttata

SEQ ID NO: 1887005 - DNA, 15 bp, Homo sapiens
gcctcatatttatat

SEQ ID NO: 1887006 - DNA, 15 bp, Homo sapiens
cctcatatttatatg

SEQ ID NO: 1887007 - DNA, 15 bp, Homo sapiens
ctcatatttatatgt

SEQ ID NO: 1887008 - DNA, 15 bp, Homo sapiens
tcatatttatatgtt

SEQ ID NO: 1887009 - DNA, 15 bp, Homo sapiens
catatttatatgttg

SEQ ID NO: 1887010 - DNA, 15 bp, Homo sapiens
atatttatatgttgg

SEQ ID NO: 1887011 - DNA, 15 bp, Homo sapiens
tatttatatgttggc

SEQ ID NO: 1887012 - DNA, 15 bp, Homo sapiens
atttatatgttggca

SEQ ID NO: 1887013 - DNA, 15 bp, Homo sapiens
tttatatgttggcat

SEQ ID NO: 1887014 - DNA, 15 bp, Homo sapiens
ttatatgttggcatc

SEQ ID NO: 1887015 - DNA, 15 bp, Homo sapiens
tatatgttggcatct

SEQ ID NO: 1887016 - DNA, 15 bp, Homo sapiens
atatgttggcatctg

SEQ ID NO: 1887017 - DNA, 15 bp, Homo sapiens
tatgttggcatctga

SEQ ID NO: 1887018 - DNA, 15 bp, Homo sapiens
atgttggcatctgaa

SEQ ID NO: 1887019 - DNA, 15 bp, Homo sapiens
tgttggcatctgaag

SEQ ID NO: 1887020 - DNA, 15 bp, Homo sapiens
gttggcatctgaagc

SEQ ID NO: 1887021 - DNA, 15 bp, Homo sapiens
ttggcatctgaagcc

SEQ ID NO: 1887022 - DNA, 15 bp, Homo sapiens
tggcatctgaagcct

SEQ ID NO: 1887023 - DNA, 15 bp, Homo sapiens
ggcatctgaagcctt

SEQ ID NO: 1887024 - DNA, 15 bp, Homo sapiens
gcatctgaagcctta

SEQ ID NO: 1887025 - DNA, 15 bp, Homo sapiens
catctgaagccttaa

SEQ ID NO: 1887026 - DNA, 15 bp, Homo sapiens
atctgaagccttaag

SEQ ID NO: 1887027 - DNA, 15 bp, Homo sapiens
tctgaagccttaagc

SEQ ID NO: 1887028 - DNA, 15 bp, Homo sapiens
ctgaagccttaagca

SEQ ID NO: 1887029 - DNA, 15 bp, Homo sapiens
tgaagccttaagcat

SEQ ID NO: 1887030 - DNA, 15 bp, Homo sapiens
gaagccttaagcatt

SEQ ID NO: 1887031 - DNA, 15 bp, Homo sapiens
aagccttaagcattt

SEQ ID NO: 1887032 - DNA, 15 bp, Homo sapiens
agccttaagcatttc

SEQ ID NO: 1887033 - DNA, 15 bp, Homo sapiens
gccttaagcatttct

SEQ ID NO: 1887034 - DNA, 15 bp, Homo sapiens
ccttaagcatttctt

SEQ ID NO: 1887035 - DNA, 15 bp, Homo sapiens
cttaagcatttcttc

SEQ ID NO: 1887036 - DNA, 15 bp, Homo sapiens
ttaagcatttcttct

SEQ ID NO: 1887037 - DNA, 15 bp, Homo sapiens
taagcatttcttctg

SEQ ID NO: 1887038 - DNA, 15 bp, Homo sapiens
aagcatttcttctga

SEQ ID NO: 1887039 - DNA, 15 bp, Homo sapiens
agcatttcttctgat

SEQ ID NO: 1887040 - DNA, 15 bp, Homo sapiens
gcatttcttctgatg

SEQ ID NO: 1887041 - DNA, 15 bp, Homo sapiens
catttcttctgatgc

SEQ ID NO: 1887042 - DNA, 15 bp, Homo sapiens
atttcttctgatgcc

SEQ ID NO: 1887043 - DNA, 15 bp, Homo sapiens
tttcttctgatgcct

SEQ ID NO: 1887044 - DNA, 15 bp, Homo sapiens
ttcttctgatgcctg

SEQ ID NO: 1887045 - DNA, 15 bp, Homo sapiens
tcttctgatgcctgt

SEQ ID NO: 1887046 - DNA, 15 bp, Homo sapiens
cttctgatgcctgtc

SEQ ID NO: 1887047 - DNA, 15 bp, Homo sapiens
ttctgatgcctgtcc

SEQ ID NO: 1887048 - DNA, 15 bp, Homo sapiens
tctgatgcctgtccc

SEQ ID NO: 1887049 - DNA, 15 bp, Homo sapiens
ctgatgcctgtccca

SEQ ID NO: 1887050 - DNA, 15 bp, Homo sapiens
tgatgcctgtcccag

SEQ ID NO: 1887051 - DNA, 15 bp, Homo sapiens
gatgcctgtcccagt

SEQ ID NO: 1887052 - DNA, 15 bp, Homo sapiens
atgcctgtcccagtt

SEQ ID NO: 1887053 - DNA, 15 bp, Homo sapiens
tgcctgtcccagtta

SEQ ID NO: 1887054 - DNA, 15 bp, Homo sapiens
gcctgtcccagttat

SEQ ID NO: 1887055 - DNA, 15 bp, Homo sapiens
cctgtcccagttatt

SEQ ID NO: 1887056 - DNA, 15 bp, Homo sapiens
ctgtcccagttattt

SEQ ID NO: 1887057 - DNA, 15 bp, Homo sapiens
tgtcccagttatttt

SEQ ID NO: 1887058 - DNA, 15 bp, Homo sapiens
gtcccagttattttc

SEQ ID NO: 1887059 - DNA, 15 bp, Homo sapiens
tcccagttattttct

SEQ ID NO: 1887060 - DNA, 15 bp, Homo sapiens
cccagttattttctc

SEQ ID NO: 1887061 - DNA, 15 bp, Homo sapiens
ccagttattttctcc

SEQ ID NO: 1887062 - DNA, 15 bp, Homo sapiens
cagttattttctcca

SEQ ID NO: 1887063 - DNA, 15 bp, Homo sapiens
agttattttctccag

SEQ ID NO: 1887064 - DNA, 15 bp, Homo sapiens
gttattttctccagt

SEQ ID NO: 1887065 - DNA, 15 bp, Homo sapiens
ttattttctccagtg

SEQ ID NO: 1887066 - DNA, 15 bp, Homo sapiens
tattttctccagtga

SEQ ID NO: 1887067 - DNA, 15 bp, Homo sapiens
attttctccagtgaa

SEQ ID NO: 1887068 - DNA, 15 bp, Homo sapiens
ttttctccagtgaat

SEQ ID NO: 1887069 - DNA, 15 bp, Homo sapiens
tttctccagtgaatc

SEQ ID NO: 1887070 - DNA, 15 bp, Homo sapiens
ttctccagtgaatca

SEQ ID NO: 1887071 - DNA, 15 bp, Homo sapiens
tctccagtgaatcac

SEQ ID NO: 1887072 - DNA, 15 bp, Homo sapiens
ctccagtgaatcact

SEQ ID NO: 1887073 - DNA, 15 bp, Homo sapiens
tccagtgaatcactt

SEQ ID NO: 1887074 - DNA, 15 bp, Homo sapiens
ccagtgaatcacttg

SEQ ID NO: 1887075 - DNA, 15 bp, Homo sapiens
cagtgaatcacttgt

SEQ ID NO: 1887076 - DNA, 15 bp, Homo sapiens
agtgaatcacttgta

SEQ ID NO: 1887077 - DNA, 15 bp, Homo sapiens
gtgaatcacttgtat

SEQ ID NO: 1887078 - DNA, 15 bp, Homo sapiens
tgaatcacttgtata

SEQ ID NO: 1887079 - DNA, 15 bp, Homo sapiens
gaatcacttgtatag

SEQ ID NO: 1887080 - DNA, 15 bp, Homo sapiens
aatcacttgtatagt

SEQ ID NO: 1887081 - DNA, 15 bp, Homo sapiens
atcacttgtatagtt

SEQ ID NO: 1887082 - DNA, 15 bp, Homo sapiens
tcacttgtatagttt

SEQ ID NO: 1887083 - DNA, 15 bp, Homo sapiens
cacttgtatagtttc

SEQ ID NO: 1887084 - DNA, 15 bp, Homo sapiens
acttgtatagtttca

SEQ ID NO: 1887085 - DNA, 15 bp, Homo sapiens
cttgtatagtttcag

SEQ ID NO: 1887086 - DNA, 15 bp, Homo sapiens
ttgtatagtttcagc

SEQ ID NO: 1887087 - DNA, 15 bp, Homo sapiens
tgtatagtttcagca

SEQ ID NO: 1887088 - DNA, 15 bp, Homo sapiens
gtatagtttcagcat

SEQ ID NO: 1887089 - DNA, 15 bp, Homo sapiens
tatagtttcagcatc

SEQ ID NO: 1887090 - DNA, 15 bp, Homo sapiens
atagtttcagcatca

SEQ ID NO: 1887091 - DNA, 15 bp, Homo sapiens
tagtttcagcatcat

SEQ ID NO: 1887092 - DNA, 15 bp, Homo sapiens
agtttcagcatcatt

SEQ ID NO: 1887093 - DNA, 15 bp, Homo sapiens
gtttcagcatcatta

SEQ ID NO: 1887094 - DNA, 15 bp, Homo sapiens
tttcagcatcattat

SEQ ID NO: 1887095 - DNA, 15 bp, Homo sapiens
ttcagcatcattatg

SEQ ID NO: 1887096 - DNA, 15 bp, Homo sapiens
tcagcatcattatgg

SEQ ID NO: 1887097 - DNA, 15 bp, Homo sapiens
cagcatcattatggt

SEQ ID NO: 1887098 - DNA, 15 bp, Homo sapiens
agcatcattatggtt

SEQ ID NO: 1887099 - DNA, 15 bp, Homo sapiens
gcatcattatggttc

SEQ ID NO: 1887100 - DNA, 15 bp, Homo sapiens
catcattatggttct

SEQ ID NO: 1887101 - DNA, 15 bp, Homo sapiens
atcattatggttctt

SEQ ID NO: 1887102 - DNA, 15 bp, Homo sapiens
tcattatggttcttt

SEQ ID NO: 1887103 - DNA, 15 bp, Homo sapiens
cattatggttctttc

SEQ ID NO: 1887104 - DNA, 15 bp, Homo sapiens
attatggttctttcc

SEQ ID NO: 1887105 - DNA, 15 bp, Homo sapiens
ttatggttctttcca

SEQ ID NO: 1887106 - DNA, 15 bp, Homo sapiens
tatggttctttccaa

SEQ ID NO: 1887107 - DNA, 15 bp, Homo sapiens
atggttctttccaag

SEQ ID NO: 1887108 - DNA, 15 bp, Homo sapiens
tggttctttccaagt

SEQ ID NO: 1887109 - DNA, 15 bp, Homo sapiens
ggttctttccaagtc

SEQ ID NO: 1887110 - DNA, 15 bp, Homo sapiens
gttctttccaagtca

SEQ ID NO: 1887111 - DNA, 15 bp, Homo sapiens
ttctttccaagtcat

SEQ ID NO: 1887112 - DNA, 15 bp, Homo sapiens
tctttccaagtcatg

SEQ ID NO: 1887113 - DNA, 15 bp, Homo sapiens
ctttccaagtcatgg

SEQ ID NO: 1887114 - DNA, 15 bp, Homo sapiens
tttccaagtcatgga

SEQ ID NO: 1887115 - DNA, 15 bp, Homo sapiens
ttccaagtcatggat

SEQ ID NO: 1887116 - DNA, 15 bp, Homo sapiens
tccaagtcatggatg

SEQ ID NO: 1887117 - DNA, 15 bp, Homo sapiens
ccaagtcatggatgc

SEQ ID NO: 1887118 - DNA, 15 bp, Homo sapiens
caagtcatggatgct

SEQ ID NO: 1887119 - DNA, 15 bp, Homo sapiens
aagtcatggatgctg

SEQ ID NO: 1887120 - DNA, 15 bp, Homo sapiens
agtcatggatgctgc

SEQ ID NO: 1887121 - DNA, 15 bp, Homo sapiens
gtcatggatgctgcc

SEQ ID NO: 1887122 - DNA, 15 bp, Homo sapiens
tcatggatgctgcca

SEQ ID NO: 1887123 - DNA, 15 bp, Homo sapiens
catggatgctgccat

SEQ ID NO: 1887124 - DNA, 15 bp, Homo sapiens
atggatgctgccatc

SEQ ID NO: 1887125 - DNA, 15 bp, Homo sapiens
tggatgctgccatct

SEQ ID NO: 1887126 - DNA, 15 bp, Homo sapiens
ggatgctgccatctg

SEQ ID NO: 1887127 - DNA, 15 bp, Homo sapiens
gatgctgccatctgt

SEQ ID NO: 1887128 - DNA, 15 bp, Homo sapiens
atgctgccatctgta

SEQ ID NO: 1887129 - DNA, 15 bp, Homo sapiens
tgctgccatctgtag

SEQ ID NO: 1887130 - DNA, 15 bp, Homo sapiens
gctgccatctgtaga

SEQ ID NO: 1887131 - DNA, 15 bp, Homo sapiens
ctgccatctgtagaa

SEQ ID NO: 1887132 - DNA, 15 bp, Homo sapiens
tgccatctgtagaaa

SEQ ID NO: 1887133 - DNA, 15 bp, Homo sapiens
gccatctgtagaaat

SEQ ID NO: 1887134 - DNA, 15 bp, Homo sapiens
ccatctgtagaaatt

SEQ ID NO: 1887135 - DNA, 15 bp, Homo sapiens
catctgtagaaattg

SEQ ID NO: 1887136 - DNA, 15 bp, Homo sapiens
atctgtagaaattgg

SEQ ID NO: 1887137 - DNA, 15 bp, Homo sapiens
tctgtagaaattggt

SEQ ID NO: 1887138 - DNA, 15 bp, Homo sapiens
ctgtagaaattggtt

SEQ ID NO: 1887139 - DNA, 15 bp, Homo sapiens
tgtagaaattggttt

SEQ ID NO: 1887140 - DNA, 15 bp, Homo sapiens
gtagaaattggtttt

SEQ ID NO: 1887141 - DNA, 15 bp, Homo sapiens
tagaaattggtttta

SEQ ID NO: 1887142 - DNA, 15 bp, Homo sapiens
agaaattggttttat

SEQ ID NO: 1887143 - DNA, 15 bp, Homo sapiens
gaaattggttttata

SEQ ID NO: 1887144 - DNA, 15 bp, Homo sapiens
aaattggttttatag

SEQ ID NO: 1887145 - DNA, 15 bp, Homo sapiens
aattggttttatagc

SEQ ID NO: 1887146 - DNA, 15 bp, Homo sapiens
attggttttatagct

SEQ ID NO: 1887147 - DNA, 15 bp, Homo sapiens
ttggttttatagctg

SEQ ID NO: 1887148 - DNA, 15 bp, Homo sapiens
tggttttatagctgt

SEQ ID NO: 1887149 - DNA, 15 bp, Homo sapiens
ggttttatagctgtt

SEQ ID NO: 1887150 - DNA, 15 bp, Homo sapiens
gttttatagctgttt

SEQ ID NO: 1887151 - DNA, 15 bp, Homo sapiens
ttttatagctgtttt

SEQ ID NO: 1887152 - DNA, 15 bp, Homo sapiens
tttatagctgttttt

SEQ ID NO: 1887153 - DNA, 15 bp, Homo sapiens
ttatagctgtttttc

SEQ ID NO: 1887154 - DNA, 15 bp, Homo sapiens
tatagctgtttttct

SEQ ID NO: 1887155 - DNA, 15 bp, Homo sapiens
atagctgtttttctg

SEQ ID NO: 1887156 - DNA, 15 bp, Homo sapiens
tagctgtttttctgg

SEQ ID NO: 1887157 - DNA, 15 bp, Homo sapiens
agctgtttttctggg

SEQ ID NO: 1887158 - DNA, 15 bp, Homo sapiens
gctgtttttctgggc

SEQ ID NO: 1887159 - DNA, 15 bp, Homo sapiens
ctgtttttctgggca

SEQ ID NO: 1887160 - DNA, 15 bp, Homo sapiens
tgtttttctgggcat

SEQ ID NO: 1887161 - DNA, 15 bp, Homo sapiens
gtttttctgggcatt

SEQ ID NO: 1887162 - DNA, 15 bp, Homo sapiens
tttttctgggcattt

SEQ ID NO: 1887163 - DNA, 15 bp, Homo sapiens
ttttctgggcatttt

SEQ ID NO: 1887164 - DNA, 15 bp, Homo sapiens
tttctgggcattttt

SEQ ID NO: 1887165 - DNA, 15 bp, Homo sapiens
ttctgggcatttttc

SEQ ID NO: 1887166 - DNA, 15 bp, Homo sapiens
tctgggcatttttct

SEQ ID NO: 1887167 - DNA, 15 bp, Homo sapiens
ctgggcatttttctc

SEQ ID NO: 1887168 - DNA, 15 bp, Homo sapiens
tgggcatttttctcc

SEQ ID NO: 1887169 - DNA, 15 bp, Homo sapiens
gggcatttttctccc

SEQ ID NO: 1887170 - DNA, 15 bp, Homo sapiens
ggcatttttctccct

SEQ ID NO: 1887171 - DNA, 15 bp, Homo sapiens
gcatttttctcccta

SEQ ID NO: 1887172 - DNA, 15 bp, Homo sapiens
catttttctccctac

SEQ ID NO: 1887173 - DNA, 15 bp, Homo sapiens
atttttctccctacc

SEQ ID NO: 1887174 - DNA, 15 bp, Homo sapiens
tttttctccctacct

SEQ ID NO: 1887175 - DNA, 15 bp, Homo sapiens
ttttctccctacctc

SEQ ID NO: 1887176 - DNA, 15 bp, Homo sapiens
tttctccctacctca

SEQ ID NO: 1887177 - DNA, 15 bp, Homo sapiens
ttctccctacctcac

SEQ ID NO: 1887178 - DNA, 15 bp, Homo sapiens
tctccctacctcacc

SEQ ID NO: 1887179 - DNA, 15 bp, Homo sapiens
ctccctacctcacca

SEQ ID NO: 1887180 - DNA, 15 bp, Homo sapiens
tccctacctcaccac

SEQ ID NO: 1887181 - DNA, 15 bp, Homo sapiens
ccctacctcaccaca

SEQ ID NO: 1887182 - DNA, 15 bp, Homo sapiens
cctacctcaccacat

SEQ ID NO: 1887183 - DNA, 15 bp, Homo sapiens
ctacctcaccacatt

SEQ ID NO: 1887184 - DNA, 15 bp, Homo sapiens
tacctcaccacattg

SEQ ID NO: 1887185 - DNA, 15 bp, Homo sapiens
acctcaccacattgt

SEQ ID NO: 1887186 - DNA, 15 bp, Homo sapiens
cctcaccacattgtt

SEQ ID NO: 1887187 - DNA, 15 bp, Homo sapiens
ctcaccacattgttt

SEQ ID NO: 1887188 - DNA, 15 bp, Homo sapiens
tcaccacattgttta

SEQ ID NO: 1887189 - DNA, 15 bp, Homo sapiens
caccacattgtttaa

SEQ ID NO: 1887190 - DNA, 15 bp, Homo sapiens
accacattgtttaaa

SEQ ID NO: 1887191 - DNA, 15 bp, Homo sapiens
ccacattgtttaaag

SEQ ID NO: 1887192 - DNA, 15 bp, Homo sapiens
cacattgtttaaagc

SEQ ID NO: 1887193 - DNA, 15 bp, Homo sapiens
acattgtttaaagcc

SEQ ID NO: 1887194 - DNA, 15 bp, Homo sapiens
cattgtttaaagccc

SEQ ID NO: 1887195 - DNA, 15 bp, Homo sapiens
attgtttaaagcccc

SEQ ID NO: 1887196 - DNA, 15 bp, Homo sapiens
ttgtttaaagcccca

SEQ ID NO: 1887197 - DNA, 15 bp, Homo sapiens
tgtttaaagccccat

SEQ ID NO: 1887198 - DNA, 15 bp, Homo sapiens
gtttaaagccccatt

SEQ ID NO: 1887199 - DNA, 15 bp, Homo sapiens
tttaaagccccattg

SEQ ID NO: 1887200 - DNA, 15 bp, Homo sapiens
ttaaagccccattga

SEQ ID NO: 1887201 - DNA, 15 bp, Homo sapiens
taaagccccattgat

SEQ ID NO: 1887202 - DNA, 15 bp, Homo sapiens
aaagccccattgatg

SEQ ID NO: 1887203 - DNA, 15 bp, Homo sapiens
aagccccattgatgg

SEQ ID NO: 1887204 - DNA, 15 bp, Homo sapiens
agccccattgatggt

SEQ ID NO: 1887205 - DNA, 15 bp, Homo sapiens
gccccattgatggtt

SEQ ID NO: 1887206 - DNA, 15 bp, Homo sapiens
ccccattgatggttc

SEQ ID NO: 1887207 - DNA, 15 bp, Homo sapiens
cccattgatggttcc

SEQ ID NO: 1887208 - DNA, 15 bp, Homo sapiens
ccattgatggttcct

SEQ ID NO: 1887209 - DNA, 15 bp, Homo sapiens
cattgatggttcctg

SEQ ID NO: 1887210 - DNA, 15 bp, Homo sapiens
attgatggttcctgc

SEQ ID NO: 1887211 - DNA, 15 bp, Homo sapiens
ttgatggttcctgcc

SEQ ID NO: 1887212 - DNA, 15 bp, Homo sapiens
tgatggttcctgcct

SEQ ID NO: 1887213 - DNA, 15 bp, Homo sapiens
gatggttcctgcctg

SEQ ID NO: 1887214 - DNA, 15 bp, Homo sapiens
atggttcctgcctga

SEQ ID NO: 1887215 - DNA, 15 bp, Homo sapiens
tggttcctgcctgaa

SEQ ID NO: 1887216 - DNA, 15 bp, Homo sapiens
ggttcctgcctgaaa

SEQ ID NO: 1887217 - DNA, 15 bp, Homo sapiens
gttcctgcctgaaat

SEQ ID NO: 1887218 - DNA, 15 bp, Homo sapiens
ttcctgcctgaaatt

SEQ ID NO: 1887219 - DNA, 15 bp, Homo sapiens
tcctgcctgaaatta

SEQ ID NO: 1887220 - DNA, 15 bp, Homo sapiens
cctgcctgaaattag

SEQ ID NO: 1887221 - DNA, 15 bp, Homo sapiens
ctgcctgaaattaga

SEQ ID NO: 1887222 - DNA, 15 bp, Homo sapiens
tgcctgaaattagag

SEQ ID NO: 1887223 - DNA, 15 bp, Homo sapiens
gcctgaaattagaga

SEQ ID NO: 1887224 - DNA, 15 bp, Homo sapiens
cctgaaattagagag

SEQ ID NO: 1887225 - DNA, 15 bp, Homo sapiens
ctgaaattagagaga

SEQ ID NO: 1887226 - DNA, 15 bp, Homo sapiens
tgaaattagagagac

SEQ ID NO: 1887227 - DNA, 15 bp, Homo sapiens
gaaattagagagact

SEQ ID NO: 1887228 - DNA, 15 bp, Homo sapiens
aaattagagagactg

SEQ ID NO: 1887229 - DNA, 15 bp, Homo sapiens
aattagagagactgg

SEQ ID NO: 1887230 - DNA, 15 bp, Homo sapiens
attagagagactggc

SEQ ID NO: 1887231 - DNA, 15 bp, Homo sapiens
ttagagagactggct

SEQ ID NO: 1887232 - DNA, 15 bp, Homo sapiens
tagagagactggcta

SEQ ID NO: 1887233 - DNA, 15 bp, Homo sapiens
agagagactggctaa

SEQ ID NO: 1887234 - DNA, 15 bp, Homo sapiens
gagagactggctaaa

SEQ ID NO: 1887235 - DNA, 15 bp, Homo sapiens
agagactggctaaag

SEQ ID NO: 1887236 - DNA, 15 bp, Homo sapiens
gagactggctaaaga

SEQ ID NO: 1887237 - DNA, 15 bp, Homo sapiens
agactggctaaagac

SEQ ID NO: 1887238 - DNA, 15 bp, Homo sapiens
gactggctaaagacc

SEQ ID NO: 1887239 - DNA, 15 bp, Homo sapiens
actggctaaagacct

SEQ ID NO: 1887240 - DNA, 15 bp, Homo sapiens
ctggctaaagacctt

SEQ ID NO: 1887241 - DNA, 15 bp, Homo sapiens
tggctaaagacctta

SEQ ID NO: 1887242 - DNA, 15 bp, Homo sapiens
ggctaaagaccttac

SEQ ID NO: 1887243 - DNA, 15 bp, Homo sapiens
gctaaagaccttaca

SEQ ID NO: 1887244 - DNA, 15 bp, Homo sapiens
ctaaagaccttacag

SEQ ID NO: 1887245 - DNA, 15 bp, Homo sapiens
taaagaccttacaga

SEQ ID NO: 1887246 - DNA, 15 bp, Homo sapiens
aaagaccttacagac

SEQ ID NO: 1887247 - DNA, 15 bp, Homo sapiens
aagaccttacagacc

SEQ ID NO: 1887248 - DNA, 15 bp, Homo sapiens
agaccttacagaccc

SEQ ID NO: 1887249 - DNA, 15 bp, Homo sapiens
gaccttacagaccct

SEQ ID NO: 1887250 - DNA, 15 bp, Homo sapiens
accttacagaccctt

SEQ ID NO: 1887251 - DNA, 15 bp, Homo sapiens
ccttacagacccttc

SEQ ID NO: 1887252 - DNA, 15 bp, Homo sapiens
cttacagacccttcc

SEQ ID NO: 1887253 - DNA, 15 bp, Homo sapiens
ttacagacccttcct

SEQ ID NO: 1887254 - DNA, 15 bp, Homo sapiens
tacagacccttccta

SEQ ID NO: 1887255 - DNA, 15 bp, Homo sapiens
acagacccttcctaa

SEQ ID NO: 1887256 - DNA, 15 bp, Homo sapiens
cagacccttcctaag

SEQ ID NO: 1887257 - DNA, 15 bp, Homo sapiens
agacccttcctaagg

SEQ ID NO: 1887258 - DNA, 15 bp, Homo sapiens
gacccttcctaaggc

SEQ ID NO: 1887259 - DNA, 15 bp, Homo sapiens
acccttcctaaggct

SEQ ID NO: 1887260 - DNA, 15 bp, Homo sapiens
cccttcctaaggcta

SEQ ID NO: 1887261 - DNA, 15 bp, Homo sapiens
ccttcctaaggctaa

SEQ ID NO: 1887262 - DNA, 15 bp, Homo sapiens
cttcctaaggctaag

SEQ ID NO: 1887263 - DNA, 15 bp, Homo sapiens
ttcctaaggctaaga

SEQ ID NO: 1887264 - DNA, 15 bp, Homo sapiens
tcctaaggctaagat

SEQ ID NO: 1887265 - DNA, 15 bp, Homo sapiens
cctaaggctaagatt

SEQ ID NO: 1887266 - DNA, 15 bp, Homo sapiens
ctaaggctaagatta

SEQ ID NO: 1887267 - DNA, 15 bp, Homo sapiens
taaggctaagattaa

SEQ ID NO: 1887268 - DNA, 15 bp, Homo sapiens
aaggctaagattaac

SEQ ID NO: 1887269 - DNA, 15 bp, Homo sapiens
aggctaagattaact

SEQ ID NO: 1887270 - DNA, 15 bp, Homo sapiens
ggctaagattaacta

SEQ ID NO: 1887271 - DNA, 15 bp, Homo sapiens
gctaagattaactag

SEQ ID NO: 1887272 - DNA, 15 bp, Homo sapiens
ctaagattaactagt

SEQ ID NO: 1887273 - DNA, 15 bp, Homo sapiens
taagattaactagta

SEQ ID NO: 1887274 - DNA, 15 bp, Homo sapiens
aagattaactagtag

SEQ ID NO: 1887275 - DNA, 15 bp, Homo sapiens
agattaactagtagc

SEQ ID NO: 1887276 - DNA, 15 bp, Homo sapiens
gattaactagtagcc

SEQ ID NO: 1887277 - DNA, 15 bp, Homo sapiens
attaactagtagccc

SEQ ID NO: 1887278 - DNA, 15 bp, Homo sapiens
ttaactagtagcccc

SEQ ID NO: 1887279 - DNA, 15 bp, Homo sapiens
taactagtagcccca

SEQ ID NO: 1887280 - DNA, 15 bp, Homo sapiens
aactagtagccccag

SEQ ID NO: 1887281 - DNA, 15 bp, Homo sapiens
actagtagccccagc

SEQ ID NO: 1887282 - DNA, 15 bp, Homo sapiens
ctagtagccccagcc

SEQ ID NO: 1887283 - DNA, 15 bp, Homo sapiens
tagtagccccagccc

SEQ ID NO: 1887284 - DNA, 15 bp, Homo sapiens
agtagccccagccct

SEQ ID NO: 1887285 - DNA, 15 bp, Homo sapiens
gtagccccagccctt

SEQ ID NO: 1887286 - DNA, 15 bp, Homo sapiens
tagccccagccctta

SEQ ID NO: 1887287 - DNA, 15 bp, Homo sapiens
agccccagcccttac

SEQ ID NO: 1887288 - DNA, 15 bp, Homo sapiens
gccccagcccttaca

SEQ ID NO: 1887289 - DNA, 15 bp, Homo sapiens
ccccagcccttacat

SEQ ID NO: 1887290 - DNA, 15 bp, Homo sapiens
cccagcccttacatt

SEQ ID NO: 1887291 - DNA, 15 bp, Homo sapiens
ccagcccttacatta

SEQ ID NO: 1887292 - DNA, 15 bp, Homo sapiens
cagcccttacattag

SEQ ID NO: 1887293 - DNA, 15 bp, Homo sapiens
agcccttacattagc

SEQ ID NO: 1887294 - DNA, 15 bp, Homo sapiens
gcccttacattagct

SEQ ID NO: 1887295 - DNA, 15 bp, Homo sapiens
cccttacattagctg

SEQ ID NO: 1887296 - DNA, 15 bp, Homo sapiens
ccttacattagctgt

SEQ ID NO: 1887297 - DNA, 15 bp, Homo sapiens
cttacattagctgtg

SEQ ID NO: 1887298 - DNA, 15 bp, Homo sapiens
ttacattagctgtga

SEQ ID NO: 1887299 - DNA, 15 bp, Homo sapiens
tacattagctgtgaa

SEQ ID NO: 1887300 - DNA, 15 bp, Homo sapiens
acattagctgtgaag

SEQ ID NO: 1887301 - DNA, 15 bp, Homo sapiens
cattagctgtgaagt

SEQ ID NO: 1887302 - DNA, 15 bp, Homo sapiens
attagctgtgaagtt

SEQ ID NO: 1887303 - DNA, 15 bp, Homo sapiens
ttagctgtgaagttc

SEQ ID NO: 1887304 - DNA, 15 bp, Homo sapiens
tagctgtgaagttca

SEQ ID NO: 1887305 - DNA, 15 bp, Homo sapiens
agctgtgaagttcag

SEQ ID NO: 1887306 - DNA, 15 bp, Homo sapiens
gctgtgaagttcagc

SEQ ID NO: 1887307 - DNA, 15 bp, Homo sapiens
ctgtgaagttcagcc

SEQ ID NO: 1887308 - DNA, 15 bp, Homo sapiens
tgtgaagttcagcct

SEQ ID NO: 1887309 - DNA, 15 bp, Homo sapiens
gtgaagttcagcctc

SEQ ID NO: 1887310 - DNA, 15 bp, Homo sapiens
tgaagttcagcctcc

SEQ ID NO: 1887311 - DNA, 15 bp, Homo sapiens
gaagttcagcctcct

SEQ ID NO: 1887312 - DNA, 15 bp, Homo sapiens
aagttcagcctcctt

SEQ ID NO: 1887313 - DNA, 15 bp, Homo sapiens
agttcagcctccttt

SEQ ID NO: 1887314 - DNA, 15 bp, Homo sapiens
gttcagcctcctttt

SEQ ID NO: 1887315 - DNA, 15 bp, Homo sapiens
ttcagcctccttttc

SEQ ID NO: 1887316 - DNA, 15 bp, Homo sapiens
tcagcctccttttcc

SEQ ID NO: 1887317 - DNA, 15 bp, Homo sapiens
cagcctccttttcct

SEQ ID NO: 1887318 - DNA, 15 bp, Homo sapiens
agcctccttttccta

SEQ ID NO: 1887319 - DNA, 15 bp, Homo sapiens
gcctccttttcctag

SEQ ID NO: 1887320 - DNA, 15 bp, Homo sapiens
cctccttttcctagc

SEQ ID NO: 1887321 - DNA, 15 bp, Homo sapiens
ctccttttcctagct

SEQ ID NO: 1887322 - DNA, 15 bp, Homo sapiens
tccttttcctagctg

SEQ ID NO: 1887323 - DNA, 15 bp, Homo sapiens
ccttttcctagctgg

SEQ ID NO: 1887324 - DNA, 15 bp, Homo sapiens
cttttcctagctggc

SEQ ID NO: 1887325 - DNA, 15 bp, Homo sapiens
ttttcctagctggct

SEQ ID NO: 1887326 - DNA, 15 bp, Homo sapiens
tttcctagctggcta

SEQ ID NO: 1887327 - DNA, 15 bp, Homo sapiens
ttcctagctggctat

SEQ ID NO: 1887328 - DNA, 15 bp, Homo sapiens
tcctagctggctatt

SEQ ID NO: 1887329 - DNA, 15 bp, Homo sapiens
cctagctggctattg

SEQ ID NO: 1887330 - DNA, 15 bp, Homo sapiens
ctagctggctattgc

SEQ ID NO: 1887331 - DNA, 15 bp, Homo sapiens
tagctggctattgca

SEQ ID NO: 1887332 - DNA, 15 bp, Homo sapiens
agctggctattgcag

SEQ ID NO: 1887333 - DNA, 15 bp, Homo sapiens
gctggctattgcagt

SEQ ID NO: 1887334 - DNA, 15 bp, Homo sapiens
ctggctattgcagtt

SEQ ID NO: 1887335 - DNA, 15 bp, Homo sapiens
tggctattgcagttt

SEQ ID NO: 1887336 - DNA, 15 bp, Homo sapiens
ggctattgcagtttg

SEQ ID NO: 1887337 - DNA, 15 bp, Homo sapiens
gctattgcagtttgt

SEQ ID NO: 1887338 - DNA, 15 bp, Homo sapiens
ctattgcagtttgtg

SEQ ID NO: 1887339 - DNA, 15 bp, Homo sapiens
tattgcagtttgtgg

SEQ ID NO: 1887340 - DNA, 15 bp, Homo sapiens
attgcagtttgtgga

SEQ ID NO: 1887341 - DNA, 15 bp, Homo sapiens
ttgcagtttgtggac

SEQ ID NO: 1887342 - DNA, 15 bp, Homo sapiens
tgcagtttgtggaca

SEQ ID NO: 1887343 - DNA, 15 bp, Homo sapiens
gcagtttgtggacag

SEQ ID NO: 1887344 - DNA, 15 bp, Homo sapiens
cagtttgtggacagt

SEQ ID NO: 1887345 - DNA, 15 bp, Homo sapiens
agtttgtggacagta

SEQ ID NO: 1887346 - DNA, 15 bp, Homo sapiens
gtttgtggacagtaa

SEQ ID NO: 1887347 - DNA, 15 bp, Homo sapiens
tttgtggacagtaaa

SEQ ID NO: 1887348 - DNA, 15 bp, Homo sapiens
ttgtggacagtaaaa

SEQ ID NO: 1887349 - DNA, 15 bp, Homo sapiens
tgtggacagtaaaag

SEQ ID NO: 1887350 - DNA, 15 bp, Homo sapiens
gtggacagtaaaagt

SEQ ID NO: 1887351 - DNA, 15 bp, Homo sapiens
tggacagtaaaagta

SEQ ID NO: 1887352 - DNA, 15 bp, Homo sapiens
ggacagtaaaagtaa

SEQ ID NO: 1887353 - DNA, 15 bp, Homo sapiens
gacagtaaaagtaac

SEQ ID NO: 1887354 - DNA, 15 bp, Homo sapiens
acagtaaaagtaaca

SEQ ID NO: 1887355 - DNA, 15 bp, Homo sapiens
cagtaaaagtaacat

SEQ ID NO: 1887356 - DNA, 15 bp, Homo sapiens
agtaaaagtaacatt

SEQ ID NO: 1887357 - DNA, 15 bp, Homo sapiens
gtaaaagtaacattt

SEQ ID NO: 1887358 - DNA, 15 bp, Homo sapiens
taaaagtaacatttg

SEQ ID NO: 1887359 - DNA, 15 bp, Homo sapiens
aaaagtaacatttgg

SEQ ID NO: 1887360 - DNA, 15 bp, Homo sapiens
agtaacatttggttt

SEQ ID NO: 1887361 - DNA, 15 bp, Homo sapiens
gtaacatttggtttt

SEQ ID NO: 1887362 - DNA, 15 bp, Homo sapiens
taacatttggtttta

SEQ ID NO: 1887363 - DNA, 15 bp, Homo sapiens
aacatttggttttac

SEQ ID NO: 1887364 - DNA, 15 bp, Homo sapiens
acatttggttttact

SEQ ID NO: 1887365 - DNA, 15 bp, Homo sapiens
catttggttttactt

SEQ ID NO: 1887366 - DNA, 15 bp, Homo sapiens
atttggttttacttt

SEQ ID NO: 1887367 - DNA, 15 bp, Homo sapiens
tttggttttactttc

SEQ ID NO: 1887368 - DNA, 15 bp, Homo sapiens
ttggttttactttct

SEQ ID NO: 1887369 - DNA, 15 bp, Homo sapiens
tggttttactttctg

SEQ ID NO: 1887370 - DNA, 15 bp, Homo sapiens
ggttttactttctgt

SEQ ID NO: 1887371 - DNA, 15 bp, Homo sapiens
tttactttctgttta

SEQ ID NO: 1887372 - DNA, 15 bp, Homo sapiens
ttactttctgtttat

SEQ ID NO: 1887373 - DNA, 15 bp, Homo sapiens
tactttctgtttatt

SEQ ID NO: 1887374 - DNA, 15 bp, Homo sapiens
actttctgtttattt

SEQ ID NO: 1887375 - DNA, 15 bp, Homo sapiens
ctttctgtttatttt

SEQ ID NO: 1887376 - DNA, 15 bp, Homo sapiens
tttctgtttattttc

SEQ ID NO: 1887377 - DNA, 15 bp, Homo sapiens
ttctgtttattttct

SEQ ID NO: 1887378 - DNA, 15 bp, Homo sapiens
tctgtttattttctc

SEQ ID NO: 1887379 - DNA, 15 bp, Homo sapiens
ctgtttattttctct

SEQ ID NO: 1887380 - DNA, 15 bp, Homo sapiens
tgtttattttctctc

SEQ ID NO: 1887381 - DNA, 15 bp, Homo sapiens
gtttattttctctct

SEQ ID NO: 1887382 - DNA, 15 bp, Homo sapiens
tttattttctctctt

SEQ ID NO: 1887383 - DNA, 15 bp, Homo sapiens
ttattttctctcttg

SEQ ID NO: 1887384 - DNA, 15 bp, Homo sapiens
tattttctctcttgt

SEQ ID NO: 1887385 - DNA, 15 bp, Homo sapiens
attttctctcttgtg

SEQ ID NO: 1887386 - DNA, 15 bp, Homo sapiens
ttttctctcttgtgg

SEQ ID NO: 1887387 - DNA, 15 bp, Homo sapiens
tttctctcttgtggt

SEQ ID NO: 1887388 - DNA, 15 bp, Homo sapiens
ttctctcttgtggtc

SEQ ID NO: 1887389 - DNA, 15 bp, Homo sapiens
tctctcttgtggtct

SEQ ID NO: 1887390 - DNA, 15 bp, Homo sapiens
ctctcttgtggtctg

SEQ ID NO: 1887391 - DNA, 15 bp, Homo sapiens
tctcttgtggtctga

SEQ ID NO: 1887392 - DNA, 15 bp, Homo sapiens
ctcttgtggtctgat

SEQ ID NO: 1887393 - DNA, 15 bp, Homo sapiens
tcttgtggtctgatg

SEQ ID NO: 1887394 - DNA, 15 bp, Homo sapiens
cttgtggtctgatgg

SEQ ID NO: 1887395 - DNA, 15 bp, Homo sapiens
ttgtggtctgatgga

SEQ ID NO: 1887396 - DNA, 15 bp, Homo sapiens
tgtggtctgatggaa

SEQ ID NO: 1887397 - DNA, 15 bp, Homo sapiens
gtggtctgatggaaa

SEQ ID NO: 1887398 - DNA, 15 bp, Homo sapiens
tggtctgatggaaat

SEQ ID NO: 1887399 - DNA, 15 bp, Homo sapiens
ggtctgatggaaata

SEQ ID NO: 1887400 - DNA, 15 bp, Homo sapiens
gtctgatggaaataa

SEQ ID NO: 1887401 - DNA, 15 bp, Homo sapiens
tctgatggaaataag

SEQ ID NO: 1887402 - DNA, 15 bp, Homo sapiens
ctgatggaaataagt

SEQ ID NO: 1887403 - DNA, 15 bp, Homo sapiens
tgatggaaataagta

SEQ ID NO: 1887404 - DNA, 15 bp, Homo sapiens
gatggaaataagtag

SEQ ID NO: 1887405 - DNA, 15 bp, Homo sapiens
atggaaataagtagg

SEQ ID NO: 1887406 - DNA, 15 bp, Homo sapiens
tggaaataagtaggg

SEQ ID NO: 1887407 - DNA, 15 bp, Homo sapiens
ggaaataagtaggga

SEQ ID NO: 1887408 - DNA, 15 bp, Homo sapiens
gaaataagtagggaa

SEQ ID NO: 1887409 - DNA, 15 bp, Homo sapiens
aaataagtagggaaa

SEQ ID NO: 1887410 - DNA, 15 bp, Homo sapiens
aataagtagggaaat

SEQ ID NO: 1887411 - DNA, 15 bp, Homo sapiens
tagggaaatggccac

SEQ ID NO: 1887412 - DNA, 15 bp, Homo sapiens
agggaaatggccaca

SEQ ID NO: 1887413 - DNA, 15 bp, Homo sapiens
gggaaatggccacaa

SEQ ID NO: 1887414 - DNA, 15 bp, Homo sapiens
ggaaatggccacaag

SEQ ID NO: 1887415 - DNA, 15 bp, Homo sapiens
gaaatggccacaagt

SEQ ID NO: 1887416 - DNA, 15 bp, Homo sapiens
aaatggccacaagtg

SEQ ID NO: 1887417 - DNA, 15 bp, Homo sapiens
aatggccacaagtga

SEQ ID NO: 1887418 - DNA, 15 bp, Homo sapiens
atggccacaagtgag

SEQ ID NO: 1887419 - DNA, 15 bp, Homo sapiens
tggccacaagtgagg

SEQ ID NO: 1887420 - DNA, 15 bp, Homo sapiens
ggccacaagtgaggc

SEQ ID NO: 1887421 - DNA, 15 bp, Homo sapiens
gccacaagtgaggca

SEQ ID NO: 1887422 - DNA, 15 bp, Homo sapiens
ccacaagtgaggcag

SEQ ID NO: 1887423 - DNA, 15 bp, Homo sapiens
cacaagtgaggcagt

SEQ ID NO: 1887424 - DNA, 15 bp, Homo sapiens
acaagtgaggcagtg

SEQ ID NO: 1887425 - DNA, 15 bp, Homo sapiens
caagtgaggcagtgg

SEQ ID NO: 1887426 - DNA, 15 bp, Homo sapiens
aagtgaggcagtggg

SEQ ID NO: 1887427 - DNA, 15 bp, Homo sapiens
agtgaggcagtgggg

SEQ ID NO: 1887428 - DNA, 15 bp, Homo sapiens
gtgaggcagtgggga

SEQ ID NO: 1887429 - DNA, 15 bp, Homo sapiens
tgaggcagtggggaa

SEQ ID NO: 1887430 - DNA, 15 bp, Homo sapiens
gaggcagtggggaag

SEQ ID NO: 1887431 - DNA, 15 bp, Homo sapiens
aggcagtggggaagg

SEQ ID NO: 1887432 - DNA, 15 bp, Homo sapiens
ggcagtggggaagga

SEQ ID NO: 1887433 - DNA, 15 bp, Homo sapiens
gcagtggggaaggag

SEQ ID NO: 1887434 - DNA, 15 bp, Homo sapiens
cagtggggaaggaga

SEQ ID NO: 1887435 - DNA, 15 bp, Homo sapiens
agtggggaaggagag

SEQ ID NO: 1887436 - DNA, 15 bp, Homo sapiens
gtggggaaggagagt

SEQ ID NO: 1887437 - DNA, 15 bp, Homo sapiens
tggggaaggagagtg

SEQ ID NO: 1887438 - DNA, 15 bp, Homo sapiens
ggggaaggagagtga

SEQ ID NO: 1887439 - DNA, 15 bp, Homo sapiens
gggaaggagagtgaa

SEQ ID NO: 1887440 - DNA, 15 bp, Homo sapiens
ggaaggagagtgaaa

SEQ ID NO: 1887441 - DNA, 15 bp, Homo sapiens
gaaggagagtgaaag

SEQ ID NO: 1887442 - DNA, 15 bp, Homo sapiens
aaggagagtgaaagg

SEQ ID NO: 1887443 - DNA, 15 bp, Homo sapiens
aggagagtgaaagga

SEQ ID NO: 1887444 - DNA, 15 bp, Homo sapiens
ggagagtgaaaggat

SEQ ID NO: 1887445 - DNA, 15 bp, Homo sapiens
gagagtgaaaggatg

SEQ ID NO: 1887446 - DNA, 15 bp, Homo sapiens
agagtgaaaggatgg

SEQ ID NO: 1887447 - DNA, 15 bp, Homo sapiens
gagtgaaaggatggg

SEQ ID NO: 1887448 - DNA, 15 bp, Homo sapiens
agtgaaaggatgggt

SEQ ID NO: 1887449 - DNA, 15 bp, Homo sapiens
gtgaaaggatgggtg

SEQ ID NO: 1887450 - DNA, 15 bp, Homo sapiens
tgaaaggatgggtgc

SEQ ID NO: 1887451 - DNA, 15 bp, Homo sapiens
gaaaggatgggtgca

SEQ ID NO: 1887452 - DNA, 15 bp, Homo sapiens
aaaggatgggtgcag

SEQ ID NO: 1887453 - DNA, 15 bp, Homo sapiens
aaggatgggtgcagg

SEQ ID NO: 1887454 - DNA, 15 bp, Homo sapiens
aggatgggtgcagga

SEQ ID NO: 1887455 - DNA, 15 bp, Homo sapiens
ggatgggtgcaggac

SEQ ID NO: 1887456 - DNA, 15 bp, Homo sapiens
gatgggtgcaggacc

SEQ ID NO: 1887457 - DNA, 15 bp, Homo sapiens
atgggtgcaggacct

SEQ ID NO: 1887458 - DNA, 15 bp, Homo sapiens
tgggtgcaggacctg

SEQ ID NO: 1887459 - DNA, 15 bp, Homo sapiens
gggtgcaggacctgc

SEQ ID NO: 1887460 - DNA, 15 bp, Homo sapiens
ggtgcaggacctgcg

SEQ ID NO: 1887461 - DNA, 15 bp, Homo sapiens
gtgcaggacctgcgt

SEQ ID NO: 1887462 - DNA, 15 bp, Homo sapiens
tgcaggacctgcgtg

SEQ ID NO: 1887463 - DNA, 15 bp, Homo sapiens
gcaggacctgcgtgg

SEQ ID NO: 1887464 - DNA, 15 bp, Homo sapiens
caggacctgcgtggt

SEQ ID NO: 1887465 - DNA, 15 bp, Homo sapiens
aggacctgcgtggtc

SEQ ID NO: 1887466 - DNA, 15 bp, Homo sapiens
ggacctgcgtggtct

SEQ ID NO: 1887467 - DNA, 15 bp, Homo sapiens
gacctgcgtggtctg

SEQ ID NO: 1887468 - DNA, 15 bp, Homo sapiens
acctgcgtggtctgt

SEQ ID NO: 1887469 - DNA, 15 bp, Homo sapiens
cctgcgtggtctgtt

SEQ ID NO: 1887470 - DNA, 15 bp, Homo sapiens
ctgcgtggtctgtta

SEQ ID NO: 1887471 - DNA, 15 bp, Homo sapiens
tgcgtggtctgttac

SEQ ID NO: 1887472 - DNA, 15 bp, Homo sapiens
gcgtggtctgttaca

SEQ ID NO: 1887473 - DNA, 15 bp, Homo sapiens
cgtggtctgttacag

SEQ ID NO: 1887474 - DNA, 15 bp, Homo sapiens
gtggtctgttacagc

SEQ ID NO: 1887475 - DNA, 15 bp, Homo sapiens
tggtctgttacagcc

SEQ ID NO: 1887476 - DNA, 15 bp, Homo sapiens
ggtctgttacagcct

SEQ ID NO: 1887477 - DNA, 15 bp, Homo sapiens
gtctgttacagcctc

SEQ ID NO: 1887478 - DNA, 15 bp, Homo sapiens
tctgttacagcctca

SEQ ID NO: 1887479 - DNA, 15 bp, Homo sapiens
ctgttacagcctcac

SEQ ID NO: 1887480 - DNA, 15 bp, Homo sapiens
tgttacagcctcacc

SEQ ID NO: 1887481 - DNA, 15 bp, Homo sapiens
gttacagcctcacca

SEQ ID NO: 1887482 - DNA, 15 bp, Homo sapiens
ttacagcctcaccac

SEQ ID NO: 1887483 - DNA, 15 bp, Homo sapiens
tacagcctcaccact

SEQ ID NO: 1887484 - DNA, 15 bp, Homo sapiens
acagcctcaccactt

SEQ ID NO: 1887485 - DNA, 15 bp, Homo sapiens
cagcctcaccacttc

SEQ ID NO: 1887486 - DNA, 15 bp, Homo sapiens
agcctcaccacttcc

SEQ ID NO: 1887487 - DNA, 15 bp, Homo sapiens
gcctcaccacttccc

SEQ ID NO: 1887488 - DNA, 15 bp, Homo sapiens
cctcaccacttccct

SEQ ID NO: 1887489 - DNA, 15 bp, Homo sapiens
ctcaccacttcccta

SEQ ID NO: 1887490 - DNA, 15 bp, Homo sapiens
tcaccacttccctat

SEQ ID NO: 1887491 - DNA, 15 bp, Homo sapiens
caccacttccctatt

SEQ ID NO: 1887492 - DNA, 15 bp, Homo sapiens
accacttccctatta

SEQ ID NO: 1887493 - DNA, 15 bp, Homo sapiens
ccacttccctattac

SEQ ID NO: 1887494 - DNA, 15 bp, Homo sapiens
cacttccctattaca

SEQ ID NO: 1887495 - DNA, 15 bp, Homo sapiens
acttccctattacat

SEQ ID NO: 1887496 - DNA, 15 bp, Homo sapiens
cttccctattacatt

SEQ ID NO: 1887497 - DNA, 15 bp, Homo sapiens
ttccctattacattc

SEQ ID NO: 1887498 - DNA, 15 bp, Homo sapiens
tccctattacattcc

SEQ ID NO: 1887499 - DNA, 15 bp, Homo sapiens
ccctattacattccc

SEQ ID NO: 1887500 - DNA, 15 bp, Homo sapiens
cctattacattccct

SEQ ID NO: 1887501 - DNA, 15 bp, Homo sapiens
ctattacattccctt

SEQ ID NO: 1887502 - DNA, 15 bp, Homo sapiens
tattacattcccttt

SEQ ID NO: 1887503 - DNA, 15 bp, Homo sapiens
attacattccctttc

SEQ ID NO: 1887504 - DNA, 15 bp, Homo sapiens
ttacattccctttct

SEQ ID NO: 1887505 - DNA, 15 bp, Homo sapiens
tacattccctttctt

SEQ ID NO: 1887506 - DNA, 15 bp, Homo sapiens
acattccctttcttt

SEQ ID NO: 1887507 - DNA, 15 bp, Homo sapiens
cattccctttctttg

SEQ ID NO: 1887508 - DNA, 15 bp, Homo sapiens
attccctttctttgg

SEQ ID NO: 1887509 - DNA, 15 bp, Homo sapiens
ttccctttctttggc

SEQ ID NO: 1887510 - DNA, 15 bp, Homo sapiens
tccctttctttggca

SEQ ID NO: 1887511 - DNA, 15 bp, Homo sapiens
ccctttctttggcag

SEQ ID NO: 1887512 - DNA, 15 bp, Homo sapiens
cctttctttggcagt

SEQ ID NO: 1887513 - DNA, 15 bp, Homo sapiens
ctttctttggcagtg

SEQ ID NO: 1887514 - DNA, 15 bp, Homo sapiens
tttctttggcagtgg

SEQ ID NO: 1887515 - DNA, 15 bp, Homo sapiens
ttctttggcagtggg

SEQ ID NO: 1887516 - DNA, 15 bp, Homo sapiens
tctttggcagtgggt

SEQ ID NO: 1887517 - DNA, 15 bp, Homo sapiens
ctttggcagtgggtt

SEQ ID NO: 1887518 - DNA, 15 bp, Homo sapiens
tttggcagtgggttg

SEQ ID NO: 1887519 - DNA, 15 bp, Homo sapiens
ttggcagtgggttgt

SEQ ID NO: 1887520 - DNA, 15 bp, Homo sapiens
tggcagtgggttgtt

SEQ ID NO: 1887521 - DNA, 15 bp, Homo sapiens
ggcagtgggttgttc

SEQ ID NO: 1887522 - DNA, 15 bp, Homo sapiens
gcagtgggttgttcc

SEQ ID NO: 1887523 - DNA, 15 bp, Homo sapiens
cagtgggttgttcct

SEQ ID NO: 1887524 - DNA, 15 bp, Homo sapiens
agtgggttgttcctc

SEQ ID NO: 1887525 - DNA, 15 bp, Homo sapiens
gtgggttgttcctca

SEQ ID NO: 1887526 - DNA, 15 bp, Homo sapiens
tgggttgttcctcat

SEQ ID NO: 1887527 - DNA, 15 bp, Homo sapiens
gggttgttcctcata

SEQ ID NO: 1887528 - DNA, 15 bp, Homo sapiens
ggttgttcctcatat

SEQ ID NO: 1887529 - DNA, 15 bp, Homo sapiens
gttgttcctcatatg

SEQ ID NO: 1887530 - DNA, 15 bp, Homo sapiens
ttgttcctcatatgc

SEQ ID NO: 1887531 - DNA, 15 bp, Homo sapiens
tgttcctcatatgct

SEQ ID NO: 1887532 - DNA, 15 bp, Homo sapiens
gttcctcatatgctt

SEQ ID NO: 1887533 - DNA, 15 bp, Homo sapiens
ttcctcatatgcttt

SEQ ID NO: 1887534 - DNA, 15 bp, Homo sapiens
tcctcatatgctttg

SEQ ID NO: 1887535 - DNA, 15 bp, Homo sapiens
cctcatatgctttgg

SEQ ID NO: 1887536 - DNA, 15 bp, Homo sapiens
ctcatatgctttgga

SEQ ID NO: 1887537 - DNA, 15 bp, Homo sapiens
tcatatgctttggaa

SEQ ID NO: 1887538 - DNA, 15 bp, Homo sapiens
catatgctttggaag

SEQ ID NO: 1887539 - DNA, 15 bp, Homo sapiens
atatgctttggaagg

SEQ ID NO: 1887540 - DNA, 15 bp, Homo sapiens
tatgctttggaaggt

SEQ ID NO: 1887541 - DNA, 15 bp, Homo sapiens
atgctttggaaggtt

SEQ ID NO: 1887542 - DNA, 15 bp, Homo sapiens
tgctttggaaggttt

SEQ ID NO: 1887543 - DNA, 15 bp, Homo sapiens
gctttggaaggttta

SEQ ID NO: 1887544 - DNA, 15 bp, Homo sapiens
ctttggaaggtttaa

SEQ ID NO: 1887545 - DNA, 15 bp, Homo sapiens
tttggaaggtttaaa

SEQ ID NO: 1887546 - DNA, 15 bp, Homo sapiens
ttggaaggtttaaat

SEQ ID NO: 1887547 - DNA, 15 bp, Homo sapiens
tggaaggtttaaatt

SEQ ID NO: 1887548 - DNA, 15 bp, Homo sapiens
ggaaggtttaaattc

SEQ ID NO: 1887549 - DNA, 15 bp, Homo sapiens
gaaggtttaaattca

SEQ ID NO: 1887550 - DNA, 15 bp, Homo sapiens
aaggtttaaattcac

SEQ ID NO: 1887551 - DNA, 15 bp, Homo sapiens
aggtttaaattcaca

SEQ ID NO: 1887552 - DNA, 15 bp, Homo sapiens
ggtttaaattcacaa

SEQ ID NO: 1887553 - DNA, 15 bp, Homo sapiens
gtttaaattcacaag

SEQ ID NO: 1887554 - DNA, 15 bp, Homo sapiens
tttaaattcacaaga

SEQ ID NO: 1887555 - DNA, 15 bp, Homo sapiens
ttaaattcacaagaa

SEQ ID NO: 1887556 - DNA, 15 bp, Homo sapiens
taaattcacaagaac

SEQ ID NO: 1887557 - DNA, 15 bp, Homo sapiens
aaattcacaagaact

SEQ ID NO: 1887558 - DNA, 15 bp, Homo sapiens
aattcacaagaactc

SEQ ID NO: 1887559 - DNA, 15 bp, Homo sapiens
attcacaagaactcc

SEQ ID NO: 1887560 - DNA, 15 bp, Homo sapiens
ttcacaagaactccc

SEQ ID NO: 1887561 - DNA, 15 bp, Homo sapiens
tcacaagaactcccc

SEQ ID NO: 1887562 - DNA, 15 bp, Homo sapiens
cacaagaactcccca

SEQ ID NO: 1887563 - DNA, 15 bp, Homo sapiens
acaagaactccccat

SEQ ID NO: 1887564 - DNA, 15 bp, Homo sapiens
caagaactccccatg

SEQ ID NO: 1887565 - DNA, 15 bp, Homo sapiens
aagaactccccatgt

SEQ ID NO: 1887566 - DNA, 15 bp, Homo sapiens
agaactccccatgtt

SEQ ID NO: 1887567 - DNA, 15 bp, Homo sapiens
gaactccccatgttc

SEQ ID NO: 1887568 - DNA, 15 bp, Homo sapiens
aactccccatgttca

SEQ ID NO: 1887569 - DNA, 15 bp, Homo sapiens
actccccatgttcat

SEQ ID NO: 1887570 - DNA, 15 bp, Homo sapiens
ctccccatgttcatt

SEQ ID NO: 1887571 - DNA, 15 bp, Homo sapiens
tccccatgttcatta

SEQ ID NO: 1887572 - DNA, 15 bp, Homo sapiens
ccccatgttcattaa

SEQ ID NO: 1887573 - DNA, 15 bp, Homo sapiens
cccatgttcattaat

SEQ ID NO: 1887574 - DNA, 15 bp, Homo sapiens
ccatgttcattaatt

SEQ ID NO: 1887575 - DNA, 15 bp, Homo sapiens
catgttcattaatta

SEQ ID NO: 1887576 - DNA, 15 bp, Homo sapiens
atgttcattaattat

SEQ ID NO: 1887577 - DNA, 15 bp, Homo sapiens
tgttcattaattatc

SEQ ID NO: 1887578 - DNA, 15 bp, Homo sapiens
gttcattaattatcc

SEQ ID NO: 1887579 - DNA, 15 bp, Homo sapiens
ttcattaattatcct

SEQ ID NO: 1887580 - DNA, 15 bp, Homo sapiens
tcattaattatcctt

SEQ ID NO: 1887581 - DNA, 15 bp, Homo sapiens
cattaattatccttt

SEQ ID NO: 1887582 - DNA, 15 bp, Homo sapiens
attaattatcctttt

SEQ ID NO: 1887583 - DNA, 15 bp, Homo sapiens
ttaattatccttttg

SEQ ID NO: 1887584 - DNA, 15 bp, Homo sapiens
taattatccttttgg

SEQ ID NO: 1887585 - DNA, 15 bp, Homo sapiens
aattatccttttggc

SEQ ID NO: 1887586 - DNA, 15 bp, Homo sapiens
attatccttttggct

SEQ ID NO: 1887587 - DNA, 15 bp, Homo sapiens
ttatccttttggctt

SEQ ID NO: 1887588 - DNA, 15 bp, Homo sapiens
tatccttttggcttc

SEQ ID NO: 1887589 - DNA, 15 bp, Homo sapiens
atccttttggcttcc

SEQ ID NO: 1887590 - DNA, 15 bp, Homo sapiens
tccttttggcttccc

SEQ ID NO: 1887591 - DNA, 15 bp, Homo sapiens
ccttttggcttccca

SEQ ID NO: 1887592 - DNA, 15 bp, Homo sapiens
cttttggcttcccac

SEQ ID NO: 1887593 - DNA, 15 bp, Homo sapiens
ttttggcttcccacc

SEQ ID NO: 1887594 - DNA, 15 bp, Homo sapiens
tttggcttcccacct

SEQ ID NO: 1887595 - DNA, 15 bp, Homo sapiens
ttggcttcccaccta

SEQ ID NO: 1887596 - DNA, 15 bp, Homo sapiens
tggcttcccacctaa

SEQ ID NO: 1887597 - DNA, 15 bp, Homo sapiens
ggcttcccacctaag

SEQ ID NO: 1887598 - DNA, 15 bp, Homo sapiens
gcttcccacctaaga

SEQ ID NO: 1887599 - DNA, 15 bp, Homo sapiens
cttcccacctaagag

SEQ ID NO: 1887600 - DNA, 15 bp, Homo sapiens
ttcccacctaagagg

SEQ ID NO: 1887601 - DNA, 15 bp, Homo sapiens
tcccacctaagaggg

SEQ ID NO: 1887602 - DNA, 15 bp, Homo sapiens
cccacctaagagggt

SEQ ID NO: 1887603 - DNA, 15 bp, Homo sapiens
ccacctaagagggtt

SEQ ID NO: 1887604 - DNA, 15 bp, Homo sapiens
cacctaagagggttg

SEQ ID NO: 1887605 - DNA, 15 bp, Homo sapiens
acctaagagggttgt

SEQ ID NO: 1887606 - DNA, 15 bp, Homo sapiens
cctaagagggttgtt

SEQ ID NO: 1887607 - DNA, 15 bp, Homo sapiens
ctaagagggttgttg

SEQ ID NO: 1887608 - DNA, 15 bp, Homo sapiens
taagagggttgttga

SEQ ID NO: 1887609 - DNA, 15 bp, Homo sapiens
aagagggttgttgaa

SEQ ID NO: 1887610 - DNA, 15 bp, Homo sapiens
agagggttgttgaaa

SEQ ID NO: 1887611 - DNA, 15 bp, Homo sapiens
gagggttgttgaaaa

SEQ ID NO: 1887612 - DNA, 15 bp, Homo sapiens
agggttgttgaaaag

SEQ ID NO: 1887613 - DNA, 15 bp, Homo sapiens
gggttgttgaaaaga

SEQ ID NO: 1887614 - DNA, 15 bp, Homo sapiens
ggttgttgaaaagat

SEQ ID NO: 1887615 - DNA, 15 bp, Homo sapiens
gttgttgaaaagatt

SEQ ID NO: 1887616 - DNA, 15 bp, Homo sapiens
ttgttgaaaagatta

SEQ ID NO: 1887617 - DNA, 15 bp, Homo sapiens
tgttgaaaagattat

SEQ ID NO: 1887618 - DNA, 15 bp, Homo sapiens
gttgaaaagattata

SEQ ID NO: 1887619 - DNA, 15 bp, Homo sapiens
ttgaaaagattatat

SEQ ID NO: 1887620 - DNA, 15 bp, Homo sapiens
tgaaaagattatatg

SEQ ID NO: 1887621 - DNA, 15 bp, Homo sapiens
gaaaagattatatga

SEQ ID NO: 1887622 - DNA, 15 bp, Homo sapiens
aaaagattatatgag

SEQ ID NO: 1887623 - DNA, 15 bp, Homo sapiens
aaagattatatgaga

SEQ ID NO: 1887624 - DNA, 15 bp, Homo sapiens
aagattatatgagat

SEQ ID NO: 1887625 - DNA, 15 bp, Homo sapiens
agattatatgagatg

SEQ ID NO: 1887626 - DNA, 15 bp, Homo sapiens
gattatatgagatga

SEQ ID NO: 1887627 - DNA, 15 bp, Homo sapiens
attatatgagatgat

SEQ ID NO: 1887628 - DNA, 15 bp, Homo sapiens
ttatatgagatgata

SEQ ID NO: 1887629 - DNA, 15 bp, Homo sapiens
tatatgagatgatat

SEQ ID NO: 1887630 - DNA, 15 bp, Homo sapiens
atatgagatgatata

SEQ ID NO: 1887631 - DNA, 15 bp, Homo sapiens
tatgagatgatatat

SEQ ID NO: 1887632 - DNA, 15 bp, Homo sapiens
atgagatgatatatg

SEQ ID NO: 1887633 - DNA, 15 bp, Homo sapiens
tgagatgatatatgt

SEQ ID NO: 1887634 - DNA, 15 bp, Homo sapiens
gagatgatatatgtt

SEQ ID NO: 1887635 - DNA, 15 bp, Homo sapiens
agatgatatatgtta

SEQ ID NO: 1887636 - DNA, 15 bp, Homo sapiens
gatgatatatgttaa

SEQ ID NO: 1887637 - DNA, 15 bp, Homo sapiens
atgatatatgttaag

SEQ ID NO: 1887638 - DNA, 15 bp, Homo sapiens
tgatatatgttaagt

SEQ ID NO: 1887639 - DNA, 15 bp, Homo sapiens
gatatatgttaagtg

SEQ ID NO: 1887640 - DNA, 15 bp, Homo sapiens
atatatgttaagtgc

SEQ ID NO: 1887641 - DNA, 15 bp, Homo sapiens
tatatgttaagtgcc

SEQ ID NO: 1887642 - DNA, 15 bp, Homo sapiens
atatgttaagtgcct

SEQ ID NO: 1887643 - DNA, 15 bp, Homo sapiens
tatgttaagtgcctg

SEQ ID NO: 1887644 - DNA, 15 bp, Homo sapiens
atgttaagtgcctgg

SEQ ID NO: 1887645 - DNA, 15 bp, Homo sapiens
tgttaagtgcctggt

SEQ ID NO: 1887646 - DNA, 15 bp, Homo sapiens
gttaagtgcctggta

SEQ ID NO: 1887647 - DNA, 15 bp, Homo sapiens
ttaagtgcctggtac

SEQ ID NO: 1887648 - DNA, 15 bp, Homo sapiens
taagtgcctggtaca

SEQ ID NO: 1887649 - DNA, 15 bp, Homo sapiens
aagtgcctggtacag

SEQ ID NO: 1887650 - DNA, 15 bp, Homo sapiens
agtgcctggtacagt

SEQ ID NO: 1887651 - DNA, 15 bp, Homo sapiens
gtgcctggtacagtg

SEQ ID NO: 1887652 - DNA, 15 bp, Homo sapiens
tgcctggtacagtgc

SEQ ID NO: 1887653 - DNA, 15 bp, Homo sapiens
gcctggtacagtgct

SEQ ID NO: 1887654 - DNA, 15 bp, Homo sapiens
cctggtacagtgctt

SEQ ID NO: 1887655 - DNA, 15 bp, Homo sapiens
ctggtacagtgctta

SEQ ID NO: 1887656 - DNA, 15 bp, Homo sapiens
tggtacagtgcttaa

SEQ ID NO: 1887657 - DNA, 15 bp, Homo sapiens
ggtacagtgcttaat

SEQ ID NO: 1887658 - DNA, 15 bp, Homo sapiens
gtacagtgcttaata

SEQ ID NO: 1887659 - DNA, 15 bp, Homo sapiens
tacagtgcttaatat

SEQ ID NO: 1887660 - DNA, 15 bp, Homo sapiens
acagtgcttaatata

SEQ ID NO: 1887661 - DNA, 15 bp, Homo sapiens
cagtgcttaatatat

SEQ ID NO: 1887662 - DNA, 15 bp, Homo sapiens
agtgcttaatatata

SEQ ID NO: 1887663 - DNA, 15 bp, Homo sapiens
gtgcttaatatatac

SEQ ID NO: 1887664 - DNA, 15 bp, Homo sapiens
tgcttaatatatact

SEQ ID NO: 1887665 - DNA, 15 bp, Homo sapiens
gcttaatatatacta

SEQ ID NO: 1887666 - DNA, 15 bp, Homo sapiens
cttaatatatactaa

SEQ ID NO: 1887667 - DNA, 15 bp, Homo sapiens
ttaatatatactaag

SEQ ID NO: 1887668 - DNA, 15 bp, Homo sapiens
taatatatactaagc

SEQ ID NO: 1887669 - DNA, 15 bp, Homo sapiens
aatatatactaagca

SEQ ID NO: 1887670 - DNA, 15 bp, Homo sapiens
atatatactaagcaa

SEQ ID NO: 1887671 - DNA, 15 bp, Homo sapiens
tatatactaagcaac

SEQ ID NO: 1887672 - DNA, 15 bp, Homo sapiens
atatactaagcaaca

SEQ ID NO: 1887673 - DNA, 15 bp, Homo sapiens
tatactaagcaacaa

SEQ ID NO: 1887674 - DNA, 15 bp, Homo sapiens
atactaagcaacaag

SEQ ID NO: 1887675 - DNA, 15 bp, Homo sapiens
tactaagcaacaagt

SEQ ID NO: 1887676 - DNA, 15 bp, Homo sapiens
actaagcaacaagtg

SEQ ID NO: 1887677 - DNA, 15 bp, Homo sapiens
ctaagcaacaagtgg

SEQ ID NO: 1887678 - DNA, 15 bp, Homo sapiens
taagcaacaagtggt

SEQ ID NO: 1887679 - DNA, 15 bp, Homo sapiens
aagcaacaagtggta

SEQ ID NO: 1887680 - DNA, 15 bp, Homo sapiens
agcaacaagtggtag

SEQ ID NO: 1887681 - DNA, 15 bp, Homo sapiens
gcaacaagtggtagc

SEQ ID NO: 1887682 - DNA, 15 bp, Homo sapiens
caacaagtggtagct

SEQ ID NO: 1887683 - DNA, 15 bp, Homo sapiens
aacaagtggtagcta

SEQ ID NO: 1887684 - DNA, 15 bp, Homo sapiens
acaagtggtagctat

SEQ ID NO: 1887685 - DNA, 15 bp, Homo sapiens
caagtggtagctatt

SEQ ID NO: 1887686 - DNA, 15 bp, Homo sapiens
aagtggtagctattg

SEQ ID NO: 1887687 - DNA, 15 bp, Homo sapiens
agtggtagctattgt

SEQ ID NO: 1887688 - DNA, 15 bp, Homo sapiens
gtggtagctattgtt

SEQ ID NO: 1887689 - DNA, 15 bp, Homo sapiens
tggtagctattgttg

SEQ ID NO: 1887690 - DNA, 15 bp, Homo sapiens
ggtagctattgttgt

SEQ ID NO: 1887691 - DNA, 15 bp, Homo sapiens
gtagctattgttgtt

SEQ ID NO: 1887692 - DNA, 15 bp, Homo sapiens
tagctattgttgttg

SEQ ID NO: 1887693 - DNA, 15 bp, Homo sapiens
agctattgttgttga

SEQ ID NO: 1887694 - DNA, 15 bp, Homo sapiens
gctattgttgttgaa

SEQ ID NO: 1887695 - DNA, 15 bp, Homo sapiens
ctattgttgttgaag

SEQ ID NO: 1887696 - DNA, 15 bp, Homo sapiens
tattgttgttgaagg

SEQ ID NO: 1887697 - DNA, 15 bp, Homo sapiens
attgttgttgaaggc

SEQ ID NO: 1887698 - DNA, 15 bp, Homo sapiens
gttgttgaaggcatg

SEQ ID NO: 1887699 - DNA, 15 bp, Homo sapiens
ttgttgaaggcatga

SEQ ID NO: 1887700 - DNA, 15 bp, Homo sapiens
tgttgaaggcatgag

SEQ ID NO: 1887701 - DNA, 15 bp, Homo sapiens
gttgaaggcatgaga

SEQ ID NO: 1887702 - DNA, 15 bp, Homo sapiens
ttgaaggcatgagat

SEQ ID NO: 1887703 - DNA, 15 bp, Homo sapiens
tgaaggcatgagatt

SEQ ID NO: 1887704 - DNA, 15 bp, Homo sapiens
gaaggcatgagattt

SEQ ID NO: 1887705 - DNA, 15 bp, Homo sapiens
aaggcatgagattta

SEQ ID NO: 1887706 - DNA, 15 bp, Homo sapiens
aggcatgagatttaa

SEQ ID NO: 1887707 - DNA, 15 bp, Homo sapiens
ggcatgagatttaac

SEQ ID NO: 1887708 - DNA, 15 bp, Homo sapiens
gcatgagatttaact

SEQ ID NO: 1887709 - DNA, 15 bp, Homo sapiens
catgagatttaactt

SEQ ID NO: 1887710 - DNA, 15 bp, Homo sapiens
atgagatttaacttg

SEQ ID NO: 1887711 - DNA, 15 bp, Homo sapiens
tgagatttaacttgt

SEQ ID NO: 1887712 - DNA, 15 bp, Homo sapiens
gagatttaacttgtt

SEQ ID NO: 1887713 - DNA, 15 bp, Homo sapiens
agatttaacttgtta

SEQ ID NO: 1887714 - DNA, 15 bp, Homo sapiens
gatttaacttgttag

SEQ ID NO: 1887715 - DNA, 15 bp, Homo sapiens
atttaacttgttagc

SEQ ID NO: 1887716 - DNA, 15 bp, Homo sapiens
tttaacttgttagct

SEQ ID NO: 1887717 - DNA, 15 bp, Homo sapiens
ttaacttgttagcta

SEQ ID NO: 1887718 - DNA, 15 bp, Homo sapiens
taacttgttagctac

SEQ ID NO: 1887719 - DNA, 15 bp, Homo sapiens
aacttgttagctact

SEQ ID NO: 1887720 - DNA, 15 bp, Homo sapiens
acttgttagctactg

SEQ ID NO: 1887721 - DNA, 15 bp, Homo sapiens
cttgttagctactgt

SEQ ID NO: 1887722 - DNA, 15 bp, Homo sapiens
ttgttagctactgtg

SEQ ID NO: 1887723 - DNA, 15 bp, Homo sapiens
tgttagctactgtgg

SEQ ID NO: 1887724 - DNA, 15 bp, Homo sapiens
gttagctactgtggc

SEQ ID NO: 1887725 - DNA, 15 bp, Homo sapiens
ttagctactgtggct

SEQ ID NO: 1887726 - DNA, 15 bp, Homo sapiens
tagctactgtggctg

SEQ ID NO: 1887727 - DNA, 15 bp, Homo sapiens
agctactgtggctga

SEQ ID NO: 1887728 - DNA, 15 bp, Homo sapiens
gctactgtggctgag

SEQ ID NO: 1887729 - DNA, 15 bp, Homo sapiens
ctactgtggctgagt

SEQ ID NO: 1887730 - DNA, 15 bp, Homo sapiens
tactgtggctgagtc

SEQ ID NO: 1887731 - DNA, 15 bp, Homo sapiens
actgtggctgagtca

SEQ ID NO: 1887732 - DNA, 15 bp, Homo sapiens
ctgtggctgagtcag

SEQ ID NO: 1887733 - DNA, 15 bp, Homo sapiens
tgtggctgagtcaga

SEQ ID NO: 1887734 - DNA, 15 bp, Homo sapiens
gtggctgagtcagat

SEQ ID NO: 1887735 - DNA, 15 bp, Homo sapiens
tggctgagtcagatt

SEQ ID NO: 1887736 - DNA, 15 bp, Homo sapiens
ggctgagtcagattt

SEQ ID NO: 1887737 - DNA, 15 bp, Homo sapiens
gctgagtcagatttt

SEQ ID NO: 1887738 - DNA, 15 bp, Homo sapiens
ctgagtcagattttg

SEQ ID NO: 1887739 - DNA, 15 bp, Homo sapiens
tgagtcagattttga

SEQ ID NO: 1887740 - DNA, 15 bp, Homo sapiens
gagtcagattttgag

SEQ ID NO: 1887741 - DNA, 15 bp, Homo sapiens
agtcagattttgagt

SEQ ID NO: 1887742 - DNA, 15 bp, Homo sapiens
gtcagattttgagtt

SEQ ID NO: 1887743 - DNA, 15 bp, Homo sapiens
tcagattttgagttc

SEQ ID NO: 1887744 - DNA, 15 bp, Homo sapiens
cagattttgagttct

SEQ ID NO: 1887745 - DNA, 15 bp, Homo sapiens
agattttgagttctt

SEQ ID NO: 1887746 - DNA, 15 bp, Homo sapiens
gattttgagttcttc

SEQ ID NO: 1887747 - DNA, 15 bp, Homo sapiens
attttgagttcttca

SEQ ID NO: 1887748 - DNA, 15 bp, Homo sapiens
ttttgagttcttcag

SEQ ID NO: 1887749 - DNA, 15 bp, Homo sapiens
tttgagttcttcaga

SEQ ID NO: 1887750 - DNA, 15 bp, Homo sapiens
ttgagttcttcagaa

SEQ ID NO: 1887751 - DNA, 15 bp, Homo sapiens
tgagttcttcagaaa

SEQ ID NO: 1887752 - DNA, 15 bp, Homo sapiens
gagttcttcagaaat

SEQ ID NO: 1887753 - DNA, 15 bp, Homo sapiens
agttcttcagaaata

SEQ ID NO: 1887754 - DNA, 15 bp, Homo sapiens
gttcttcagaaataa

SEQ ID NO: 1887755 - DNA, 15 bp, Homo sapiens
ttcttcagaaataac

SEQ ID NO: 1887756 - DNA, 15 bp, Homo sapiens
tcttcagaaataaca

SEQ ID NO: 1887757 - DNA, 15 bp, Homo sapiens
cttcagaaataacac

SEQ ID NO: 1887758 - DNA, 15 bp, Homo sapiens
ttcagaaataacact

SEQ ID NO: 1887759 - DNA, 15 bp, Homo sapiens
tcagaaataacacta

SEQ ID NO: 1887760 - DNA, 15 bp, Homo sapiens
cagaaataacactac

SEQ ID NO: 1887761 - DNA, 15 bp, Homo sapiens
agaaataacactact

SEQ ID NO: 1887762 - DNA, 15 bp, Homo sapiens
gaaataacactactt

SEQ ID NO: 1887763 - DNA, 15 bp, Homo sapiens
aaataacactacttg

SEQ ID NO: 1887764 - DNA, 15 bp, Homo sapiens
aataacactacttgt

SEQ ID NO: 1887765 - DNA, 15 bp, Homo sapiens
ataacactacttgta

SEQ ID NO: 1887766 - DNA, 15 bp, Homo sapiens
taacactacttgtag

SEQ ID NO: 1887767 - DNA, 15 bp, Homo sapiens
aacactacttgtagg

SEQ ID NO: 1887768 - DNA, 15 bp, Homo sapiens
acactacttgtaggt

SEQ ID NO: 1887769 - DNA, 15 bp, Homo sapiens
cactacttgtaggtt

SEQ ID NO: 1887770 - DNA, 15 bp, Homo sapiens
actacttgtaggttc

SEQ ID NO: 1887771 - DNA, 15 bp, Homo sapiens
ctacttgtaggttct

SEQ ID NO: 1887772 - DNA, 15 bp, Homo sapiens
tacttgtaggttctt

SEQ ID NO: 1887773 - DNA, 15 bp, Homo sapiens
acttgtaggttcttc

SEQ ID NO: 1887774 - DNA, 15 bp, Homo sapiens
cttgtaggttcttcc

SEQ ID NO: 1887775 - DNA, 15 bp, Homo sapiens
ttgtaggttcttcca

SEQ ID NO: 1887776 - DNA, 15 bp, Homo sapiens
tgtaggttcttccag

SEQ ID NO: 1887777 - DNA, 15 bp, Homo sapiens
gtaggttcttccagt

SEQ ID NO: 1887778 - DNA, 15 bp, Homo sapiens
taggttcttccagtg

SEQ ID NO: 1887779 - DNA, 15 bp, Homo sapiens
aggttcttccagtgt

SEQ ID NO: 1887780 - DNA, 15 bp, Homo sapiens
ggttcttccagtgtt

SEQ ID NO: 1887781 - DNA, 15 bp, Homo sapiens
gttcttccagtgttc

SEQ ID NO: 1887782 - DNA, 15 bp, Homo sapiens
ttcttccagtgttct

SEQ ID NO: 1887783 - DNA, 15 bp, Homo sapiens
tcttccagtgttctc

SEQ ID NO: 1887784 - DNA, 15 bp, Homo sapiens
cttccagtgttctct

SEQ ID NO: 1887785 - DNA, 15 bp, Homo sapiens
ttccagtgttctctg

SEQ ID NO: 1887786 - DNA, 15 bp, Homo sapiens
tccagtgttctctga

SEQ ID NO: 1887787 - DNA, 15 bp, Homo sapiens
ccagtgttctctgaa

SEQ ID NO: 1887788 - DNA, 15 bp, Homo sapiens
cagtgttctctgaag

SEQ ID NO: 1887789 - DNA, 15 bp, Homo sapiens
agtgttctctgaagc

SEQ ID NO: 1887790 - DNA, 15 bp, Homo sapiens
gtgttctctgaagca

SEQ ID NO: 1887791 - DNA, 15 bp, Homo sapiens
tgttctctgaagcag

SEQ ID NO: 1887792 - DNA, 15 bp, Homo sapiens
gttctctgaagcaga

SEQ ID NO: 1887793 - DNA, 15 bp, Homo sapiens
ttctctgaagcagaa

SEQ ID NO: 1887794 - DNA, 15 bp, Homo sapiens
tctctgaagcagaaa

SEQ ID NO: 1887795 - DNA, 15 bp, Homo sapiens
ctctgaagcagaaag

SEQ ID NO: 1887796 - DNA, 15 bp, Homo sapiens
tctgaagcagaaagt

SEQ ID NO: 1887797 - DNA, 15 bp, Homo sapiens
ctgaagcagaaagtc

SEQ ID NO: 1887798 - DNA, 15 bp, Homo sapiens
tgaagcagaaagtca

SEQ ID NO: 1887799 - DNA, 15 bp, Homo sapiens
gaagcagaaagtcag

SEQ ID NO: 1887800 - DNA, 15 bp, Homo sapiens
aagcagaaagtcagt

SEQ ID NO: 1887801 - DNA, 15 bp, Homo sapiens
agcagaaagtcagtg

SEQ ID NO: 1887802 - DNA, 15 bp, Homo sapiens
gcagaaagtcagtgc

SEQ ID NO: 1887803 - DNA, 15 bp, Homo sapiens
cagaaagtcagtgct

SEQ ID NO: 1887804 - DNA, 15 bp, Homo sapiens
agaaagtcagtgcta

SEQ ID NO: 1887805 - DNA, 15 bp, Homo sapiens
gaaagtcagtgctaa

SEQ ID NO: 1887806 - DNA, 15 bp, Homo sapiens
aaagtcagtgctaac

SEQ ID NO: 1887807 - DNA, 15 bp, Homo sapiens
aagtcagtgctaact

SEQ ID NO: 1887808 - DNA, 15 bp, Homo sapiens
agtcagtgctaactg

SEQ ID NO: 1887809 - DNA, 15 bp, Homo sapiens
gtcagtgctaactgt

SEQ ID NO: 1887810 - DNA, 15 bp, Homo sapiens
tcagtgctaactgta

SEQ ID NO: 1887811 - DNA, 15 bp, Homo sapiens
cagtgctaactgtaa

SEQ ID NO: 1887812 - DNA, 15 bp, Homo sapiens
agtgctaactgtaaa

SEQ ID NO: 1887813 - DNA, 15 bp, Homo sapiens
gtgctaactgtaaag

SEQ ID NO: 1887814 - DNA, 15 bp, Homo sapiens
tgctaactgtaaaga

SEQ ID NO: 1887815 - DNA, 15 bp, Homo sapiens
gctaactgtaaagag

SEQ ID NO: 1887816 - DNA, 15 bp, Homo sapiens
ctaactgtaaagaga

SEQ ID NO: 1887817 - DNA, 15 bp, Homo sapiens
taactgtaaagagat

SEQ ID NO: 1887818 - DNA, 15 bp, Homo sapiens
aactgtaaagagatg

SEQ ID NO: 1887819 - DNA, 15 bp, Homo sapiens
actgtaaagagatgt

SEQ ID NO: 1887820 - DNA, 15 bp, Homo sapiens
ctgtaaagagatgtt

SEQ ID NO: 1887821 - DNA, 15 bp, Homo sapiens
tgtaaagagatgttg

SEQ ID NO: 1887822 - DNA, 15 bp, Homo sapiens
gtaaagagatgttga

SEQ ID NO: 1887823 - DNA, 15 bp, Homo sapiens
taaagagatgttgaa

SEQ ID NO: 1887824 - DNA, 15 bp, Homo sapiens
aaagagatgttgaag

SEQ ID NO: 1887825 - DNA, 15 bp, Homo sapiens
aagagatgttgaagc

SEQ ID NO: 1887826 - DNA, 15 bp, Homo sapiens
agagatgttgaagca

SEQ ID NO: 1887827 - DNA, 15 bp, Homo sapiens
gagatgttgaagcac

SEQ ID NO: 1887828 - DNA, 15 bp, Homo sapiens
agatgttgaagcact

SEQ ID NO: 1887829 - DNA, 15 bp, Homo sapiens
gatgttgaagcactg

SEQ ID NO: 1887830 - DNA, 15 bp, Homo sapiens
atgttgaagcactgt

SEQ ID NO: 1887831 - DNA, 15 bp, Homo sapiens
tgttgaagcactgtg

SEQ ID NO: 1887832 - DNA, 15 bp, Homo sapiens
gttgaagcactgtgt

SEQ ID NO: 1887833 - DNA, 15 bp, Homo sapiens
ttgaagcactgtgtt

SEQ ID NO: 1887834 - DNA, 15 bp, Homo sapiens
tgaagcactgtgttt

SEQ ID NO: 1887835 - DNA, 15 bp, Homo sapiens
gaagcactgtgtttt

SEQ ID NO: 1887836 - DNA, 15 bp, Homo sapiens
aagcactgtgttttt

SEQ ID NO: 1887837 - DNA, 15 bp, Homo sapiens
agcactgtgtttttt

SEQ ID NO: 1887838 - DNA, 15 bp, Homo sapiens
gcactgtgttttttt

SEQ ID NO: 1887839 - DNA, 15 bp, Homo sapiens
cactgtgtttttttt

SEQ ID NO: 1887840 - DNA, 15 bp, Homo sapiens
actgtgttttttttc

SEQ ID NO: 1887841 - DNA, 15 bp, Homo sapiens
ctgtgttttttttca

SEQ ID NO: 1887842 - DNA, 15 bp, Homo sapiens
tgtgttttttttcag

SEQ ID NO: 1887843 - DNA, 15 bp, Homo sapiens
gtgttttttttcagt

SEQ ID NO: 1887844 - DNA, 15 bp, Homo sapiens
tgttttttttcagtg

SEQ ID NO: 1887845 - DNA, 15 bp, Homo sapiens
gttttttttcagtga

SEQ ID NO: 1887846 - DNA, 15 bp, Homo sapiens
ttttttttcagtgag

SEQ ID NO: 1887847 - DNA, 15 bp, Homo sapiens
tttttttcagtgagt

SEQ ID NO: 1887848 - DNA, 15 bp, Homo sapiens
ttttttcagtgagta

SEQ ID NO: 1887849 - DNA, 15 bp, Homo sapiens
tttttcagtgagtaa

SEQ ID NO: 1887850 - DNA, 15 bp, Homo sapiens
ttttcagtgagtaac

SEQ ID NO: 1887851 - DNA, 15 bp, Homo sapiens
tttcagtgagtaact

SEQ ID NO: 1887852 - DNA, 15 bp, Homo sapiens
ttcagtgagtaactt

SEQ ID NO: 1887853 - DNA, 15 bp, Homo sapiens
tcagtgagtaacttg

SEQ ID NO: 1887854 - DNA, 15 bp, Homo sapiens
cagtgagtaacttga

SEQ ID NO: 1887855 - DNA, 15 bp, Homo sapiens
agtgagtaacttgat

SEQ ID NO: 1887856 - DNA, 15 bp, Homo sapiens
gtgagtaacttgatt

SEQ ID NO: 1887857 - DNA, 15 bp, Homo sapiens
tgagtaacttgattt

SEQ ID NO: 1887858 - DNA, 15 bp, Homo sapiens
gagtaacttgattta

SEQ ID NO: 1887859 - DNA, 15 bp, Homo sapiens
agtaacttgatttaa

SEQ ID NO: 1887860 - DNA, 15 bp, Homo sapiens
gtaacttgatttaac

SEQ ID NO: 1887861 - DNA, 15 bp, Homo sapiens
taacttgatttaacg

SEQ ID NO: 1887862 - DNA, 15 bp, Homo sapiens
aacttgatttaacga

SEQ ID NO: 1887863 - DNA, 15 bp, Homo sapiens
acttgatttaacgaa

SEQ ID NO: 1887864 - DNA, 15 bp, Homo sapiens
cttgatttaacgaat

SEQ ID NO: 1887865 - DNA, 15 bp, Homo sapiens
ttgatttaacgaatt

SEQ ID NO: 1887866 - DNA, 15 bp, Homo sapiens
tgatttaacgaattt

SEQ ID NO: 1887867 - DNA, 15 bp, Homo sapiens
gatttaacgaatttc

SEQ ID NO: 1887868 - DNA, 15 bp, Homo sapiens
atttaacgaatttct

SEQ ID NO: 1887869 - DNA, 15 bp, Homo sapiens
tttaacgaatttctt

SEQ ID NO: 1887870 - DNA, 15 bp, Homo sapiens
ttaacgaatttctta

SEQ ID NO: 1887871 - DNA, 15 bp, Homo sapiens
taacgaatttcttat

SEQ ID NO: 1887872 - DNA, 15 bp, Homo sapiens
aacgaatttcttatt

SEQ ID NO: 1887873 - DNA, 15 bp, Homo sapiens
acgaatttcttattc

SEQ ID NO: 1887874 - DNA, 15 bp, Homo sapiens
cgaatttcttattct

SEQ ID NO: 1887875 - DNA, 15 bp, Homo sapiens
gaatttcttattctg

SEQ ID NO: 1887876 - DNA, 15 bp, Homo sapiens
aatttcttattctga

SEQ ID NO: 1887877 - DNA, 15 bp, Homo sapiens
atttcttattctgaa

SEQ ID NO: 1887878 - DNA, 15 bp, Homo sapiens
tttcttattctgaag

SEQ ID NO: 1887879 - DNA, 15 bp, Homo sapiens
ttcttattctgaaga

SEQ ID NO: 1887880 - DNA, 15 bp, Homo sapiens
tcttattctgaagaa

SEQ ID NO: 1887881 - DNA, 15 bp, Homo sapiens
cttattctgaagaaa

SEQ ID NO: 1887882 - DNA, 15 bp, Homo sapiens
ttattctgaagaaat

SEQ ID NO: 1887883 - DNA, 15 bp, Homo sapiens
tattctgaagaaatc

SEQ ID NO: 1887884 - DNA, 15 bp, Homo sapiens
attctgaagaaatcc

SEQ ID NO: 1887885 - DNA, 15 bp, Homo sapiens
ttctgaagaaatcct

SEQ ID NO: 1887886 - DNA, 15 bp, Homo sapiens
tctgaagaaatcctt

SEQ ID NO: 1887887 - DNA, 15 bp, Homo sapiens
ctgaagaaatcctta

SEQ ID NO: 1887888 - DNA, 15 bp, Homo sapiens
tgaagaaatccttag

SEQ ID NO: 1887889 - DNA, 15 bp, Homo sapiens
gaagaaatccttaga

SEQ ID NO: 1887890 - DNA, 15 bp, Homo sapiens
aagaaatccttagat

SEQ ID NO: 1887891 - DNA, 15 bp, Homo sapiens
agaaatccttagatt

SEQ ID NO: 1887892 - DNA, 15 bp, Homo sapiens
gaaatccttagattg

SEQ ID NO: 1887893 - DNA, 15 bp, Homo sapiens
aaatccttagattga

SEQ ID NO: 1887894 - DNA, 15 bp, Homo sapiens
aatccttagattgaa

SEQ ID NO: 1887895 - DNA, 15 bp, Homo sapiens
atccttagattgaag

SEQ ID NO: 1887896 - DNA, 15 bp, Homo sapiens
tccttagattgaaga

SEQ ID NO: 1887897 - DNA, 15 bp, Homo sapiens
ccttagattgaagat

SEQ ID NO: 1887898 - DNA, 15 bp, Homo sapiens
cttagattgaagata

SEQ ID NO: 1887899 - DNA, 15 bp, Homo sapiens
ttagattgaagataa

SEQ ID NO: 1887900 - DNA, 15 bp, Homo sapiens
tagattgaagataat

SEQ ID NO: 1887901 - DNA, 15 bp, Homo sapiens
agattgaagataatc

SEQ ID NO: 1887902 - DNA, 15 bp, Homo sapiens
gattgaagataatct

SEQ ID NO: 1887903 - DNA, 15 bp, Homo sapiens
attgaagataatctg

SEQ ID NO: 1887904 - DNA, 15 bp, Homo sapiens
ttgaagataatctgt

SEQ ID NO: 1887905 - DNA, 15 bp, Homo sapiens
tgaagataatctgtg

SEQ ID NO: 1887906 - DNA, 15 bp, Homo sapiens
gaagataatctgtgt

SEQ ID NO: 1887907 - DNA, 15 bp, Homo sapiens
aagataatctgtgtt

SEQ ID NO: 1887908 - DNA, 15 bp, Homo sapiens
agataatctgtgttt

SEQ ID NO: 1887909 - DNA, 15 bp, Homo sapiens
gataatctgtgttta

SEQ ID NO: 1887910 - DNA, 15 bp, Homo sapiens
ataatctgtgtttag

SEQ ID NO: 1887911 - DNA, 15 bp, Homo sapiens
taatctgtgtttagt

SEQ ID NO: 1887912 - DNA, 15 bp, Homo sapiens
aatctgtgtttagtt

SEQ ID NO: 1887913 - DNA, 15 bp, Homo sapiens
atctgtgtttagtta

SEQ ID NO: 1887914 - DNA, 15 bp, Homo sapiens
tctgtgtttagttaa

SEQ ID NO: 1887915 - DNA, 15 bp, Homo sapiens
ctgtgtttagttaac

SEQ ID NO: 1887916 - DNA, 15 bp, Homo sapiens
tgtgtttagttaaca

SEQ ID NO: 1887917 - DNA, 15 bp, Homo sapiens
gtgtttagttaacag

SEQ ID NO: 1887918 - DNA, 15 bp, Homo sapiens
tgtttagttaacaga

SEQ ID NO: 1887919 - DNA, 15 bp, Homo sapiens
gtttagttaacagaa

SEQ ID NO: 1887920 - DNA, 15 bp, Homo sapiens
tttagttaacagaag

SEQ ID NO: 1887921 - DNA, 15 bp, Homo sapiens
ttagttaacagaagt

SEQ ID NO: 1887922 - DNA, 15 bp, Homo sapiens
tagttaacagaagta

SEQ ID NO: 1887923 - DNA, 15 bp, Homo sapiens
agttaacagaagtaa

SEQ ID NO: 1887924 - DNA, 15 bp, Homo sapiens
gttaacagaagtaaa

SEQ ID NO: 1887925 - DNA, 15 bp, Homo sapiens
ttaacagaagtaaac

SEQ ID NO: 1887926 - DNA, 15 bp, Homo sapiens
taacagaagtaaacc

SEQ ID NO: 1887927 - DNA, 15 bp, Homo sapiens
aacagaagtaaacct

SEQ ID NO: 1887928 - DNA, 15 bp, Homo sapiens
acagaagtaaacctg

SEQ ID NO: 1887929 - DNA, 15 bp, Homo sapiens
cagaagtaaacctgt

SEQ ID NO: 1887930 - DNA, 15 bp, Homo sapiens
agaagtaaacctgta

SEQ ID NO: 1887931 - DNA, 15 bp, Homo sapiens
gaagtaaacctgtat

SEQ ID NO: 1887932 - DNA, 15 bp, Homo sapiens
aagtaaacctgtata

SEQ ID NO: 1887933 - DNA, 15 bp, Homo sapiens
agtaaacctgtatat

SEQ ID NO: 1887934 - DNA, 15 bp, Homo sapiens
gtaaacctgtatata

SEQ ID NO: 1887935 - DNA, 15 bp, Homo sapiens
taaacctgtatatag

SEQ ID NO: 1887936 - DNA, 15 bp, Homo sapiens
aaacctgtatatagc

SEQ ID NO: 1887937 - DNA, 15 bp, Homo sapiens
aacctgtatatagca

SEQ ID NO: 1887938 - DNA, 15 bp, Homo sapiens
acctgtatatagcac

SEQ ID NO: 1887939 - DNA, 15 bp, Homo sapiens
cctgtatatagcacc

SEQ ID NO: 1887940 - DNA, 15 bp, Homo sapiens
ctgtatatagcacct

SEQ ID NO: 1887941 - DNA, 15 bp, Homo sapiens
tgtatatagcacctc

SEQ ID NO: 1887942 - DNA, 15 bp, Homo sapiens
gtatatagcacctct

SEQ ID NO: 1887943 - DNA, 15 bp, Homo sapiens
tatatagcacctcta

SEQ ID NO: 1887944 - DNA, 15 bp, Homo sapiens
atatagcacctctaa

SEQ ID NO: 1887945 - DNA, 15 bp, Homo sapiens
tatagcacctctaac

SEQ ID NO: 1887946 - DNA, 15 bp, Homo sapiens
atagcacctctaact

SEQ ID NO: 1887947 - DNA, 15 bp, Homo sapiens
tagcacctctaactt

SEQ ID NO: 1887948 - DNA, 15 bp, Homo sapiens
agcacctctaacttt

SEQ ID NO: 1887949 - DNA, 15 bp, Homo sapiens
gcacctctaactttg

SEQ ID NO: 1887950 - DNA, 15 bp, Homo sapiens
cacctctaactttga

SEQ ID NO: 1887951 - DNA, 15 bp, Homo sapiens
acctctaactttgag

SEQ ID NO: 1887952 - DNA, 15 bp, Homo sapiens
cctctaactttgagt

SEQ ID NO: 1887953 - DNA, 15 bp, Homo sapiens
ctctaactttgagtg

SEQ ID NO: 1887954 - DNA, 15 bp, Homo sapiens
tctaactttgagtgt

SEQ ID NO: 1887955 - DNA, 15 bp, Homo sapiens
ctaactttgagtgtt

SEQ ID NO: 1887956 - DNA, 15 bp, Homo sapiens
taactttgagtgttg

SEQ ID NO: 1887957 - DNA, 15 bp, Homo sapiens
aactttgagtgttgg

SEQ ID NO: 1887958 - DNA, 15 bp, Homo sapiens
actttgagtgttgga

SEQ ID NO: 1887959 - DNA, 15 bp, Homo sapiens
ctttgagtgttggaa

SEQ ID NO: 1887960 - DNA, 15 bp, Homo sapiens
tttgagtgttggaag

SEQ ID NO: 1887961 - DNA, 15 bp, Homo sapiens
ttgagtgttggaagg

SEQ ID NO: 1887962 - DNA, 15 bp, Homo sapiens
tgagtgttggaagga

SEQ ID NO: 1887963 - DNA, 15 bp, Homo sapiens
gagtgttggaaggaa

SEQ ID NO: 1887964 - DNA, 15 bp, Homo sapiens
agtgttggaaggaac

SEQ ID NO: 1887965 - DNA, 15 bp, Homo sapiens
gtgttggaaggaact

SEQ ID NO: 1887966 - DNA, 15 bp, Homo sapiens
tgttggaaggaacta

SEQ ID NO: 1887967 - DNA, 15 bp, Homo sapiens
gttggaaggaactat

SEQ ID NO: 1887968 - DNA, 15 bp, Homo sapiens
ttggaaggaactatt

SEQ ID NO: 1887969 - DNA, 15 bp, Homo sapiens
tggaaggaactattt

SEQ ID NO: 1887970 - DNA, 15 bp, Homo sapiens
ggaaggaactattta

SEQ ID NO: 1887971 - DNA, 15 bp, Homo sapiens
gaaggaactatttaa

SEQ ID NO: 1887972 - DNA, 15 bp, Homo sapiens
aggaactatttaata

SEQ ID NO: 1887973 - DNA, 15 bp, Homo sapiens
ggaactatttaataa

SEQ ID NO: 1887974 - DNA, 15 bp, Homo sapiens
gaactatttaataac

SEQ ID NO: 1887975 - DNA, 15 bp, Homo sapiens
aactatttaataaca

SEQ ID NO: 1887976 - DNA, 15 bp, Homo sapiens
actatttaataacag

SEQ ID NO: 1887977 - DNA, 15 bp, Homo sapiens
ctatttaataacagc

SEQ ID NO: 1887978 - DNA, 15 bp, Homo sapiens
tatttaataacagct

SEQ ID NO: 1887979 - DNA, 15 bp, Homo sapiens
atttaataacagctg

SEQ ID NO: 1887980 - DNA, 15 bp, Homo sapiens
tttaataacagctgt

SEQ ID NO: 1887981 - DNA, 15 bp, Homo sapiens
ttaataacagctgtt

SEQ ID NO: 1887982 - DNA, 15 bp, Homo sapiens
taataacagctgtta

SEQ ID NO: 1887983 - DNA, 15 bp, Homo sapiens
aataacagctgttat

SEQ ID NO: 1887984 - DNA, 15 bp, Homo sapiens
ataacagctgttatc

SEQ ID NO: 1887985 - DNA, 15 bp, Homo sapiens
taacagctgttatca

SEQ ID NO: 1887986 - DNA, 15 bp, Homo sapiens
aacagctgttatcat

SEQ ID NO: 1887987 - DNA, 15 bp, Homo sapiens
acagctgttatcatc

SEQ ID NO: 1887988 - DNA, 15 bp, Homo sapiens
cagctgttatcatca

SEQ ID NO: 1887989 - DNA, 15 bp, Homo sapiens
agctgttatcatcac

SEQ ID NO: 1887990 - DNA, 15 bp, Homo sapiens
gctgttatcatcacc

SEQ ID NO: 1887991 - DNA, 15 bp, Homo sapiens
ctgttatcatcacca

SEQ ID NO: 1887992 - DNA, 15 bp, Homo sapiens
tgttatcatcaccat

SEQ ID NO: 1887993 - DNA, 15 bp, Homo sapiens
gttatcatcaccatc

SEQ ID NO: 1887994 - DNA, 15 bp, Homo sapiens
ttatcatcaccatca

SEQ ID NO: 1887995 - DNA, 15 bp, Homo sapiens
tatcatcaccatcac

SEQ ID NO: 1887996 - DNA, 15 bp, Homo sapiens
atcatcaccatcact

SEQ ID NO: 1887997 - DNA, 15 bp, Homo sapiens
tcatcaccatcacta

SEQ ID NO: 1887998 - DNA, 15 bp, Homo sapiens
catcaccatcactag

SEQ ID NO: 1887999 - DNA, 15 bp, Homo sapiens
atcaccatcactagc

SEQ ID NO: 1888000 - DNA, 15 bp, Homo sapiens
tcaccatcactagct

SEQ ID NO: 1888001 - DNA, 15 bp, Homo sapiens
caccatcactagctg

SEQ ID NO: 1888002 - DNA, 15 bp, Homo sapiens
accatcactagctga

SEQ ID NO: 1888003 - DNA, 15 bp, Homo sapiens
ccatcactagctgac

SEQ ID NO: 1888004 - DNA, 15 bp, Homo sapiens
catcactagctgaca

SEQ ID NO: 1888005 - DNA, 15 bp, Homo sapiens
atcactagctgacat

SEQ ID NO: 1888006 - DNA, 15 bp, Homo sapiens
tcactagctgacatt

SEQ ID NO: 1888007 - DNA, 15 bp, Homo sapiens
cactagctgacattt

SEQ ID NO: 1888008 - DNA, 15 bp, Homo sapiens
actagctgacattta

SEQ ID NO: 1888009 - DNA, 15 bp, Homo sapiens
ctagctgacatttat

SEQ ID NO: 1888010 - DNA, 15 bp, Homo sapiens
tagctgacatttatt

SEQ ID NO: 1888011 - DNA, 15 bp, Homo sapiens
agctgacatttattg

SEQ ID NO: 1888012 - DNA, 15 bp, Homo sapiens
gctgacatttattga

SEQ ID NO: 1888013 - DNA, 15 bp, Homo sapiens
ctgacatttattgag

SEQ ID NO: 1888014 - DNA, 15 bp, Homo sapiens
tgacatttattgagc

SEQ ID NO: 1888015 - DNA, 15 bp, Homo sapiens
gacatttattgagca

SEQ ID NO: 1888016 - DNA, 15 bp, Homo sapiens
acatttattgagcac

SEQ ID NO: 1888017 - DNA, 15 bp, Homo sapiens
catttattgagcact

SEQ ID NO: 1888018 - DNA, 15 bp, Homo sapiens
atttattgagcactt

SEQ ID NO: 1888019 - DNA, 15 bp, Homo sapiens
tttattgagcactta

SEQ ID NO: 1888020 - DNA, 15 bp, Homo sapiens
ttattgagcacttaa

SEQ ID NO: 1888021 - DNA, 15 bp, Homo sapiens
tattgagcacttaac

SEQ ID NO: 1888022 - DNA, 15 bp, Homo sapiens
attgagcacttaacc

SEQ ID NO: 1888023 - DNA, 15 bp, Homo sapiens
ttgagcacttaacca

SEQ ID NO: 1888024 - DNA, 15 bp, Homo sapiens
tgagcacttaaccac

SEQ ID NO: 1888025 - DNA, 15 bp, Homo sapiens
gagcacttaaccaca

SEQ ID NO: 1888026 - DNA, 15 bp, Homo sapiens
agcacttaaccacat

SEQ ID NO: 1888027 - DNA, 15 bp, Homo sapiens
gcacttaaccacatg

SEQ ID NO: 1888028 - DNA, 15 bp, Homo sapiens
cacttaaccacatgc

SEQ ID NO: 1888029 - DNA, 15 bp, Homo sapiens
acttaaccacatgct

SEQ ID NO: 1888030 - DNA, 15 bp, Homo sapiens
cttaaccacatgctg

SEQ ID NO: 1888031 - DNA, 15 bp, Homo sapiens
ttaaccacatgctgg

SEQ ID NO: 1888032 - DNA, 15 bp, Homo sapiens
taaccacatgctggc

SEQ ID NO: 1888033 - DNA, 15 bp, Homo sapiens
aaccacatgctggct

SEQ ID NO: 1888034 - DNA, 15 bp, Homo sapiens
accacatgctggcta

SEQ ID NO: 1888035 - DNA, 15 bp, Homo sapiens
ccacatgctggctac

SEQ ID NO: 1888036 - DNA, 15 bp, Homo sapiens
cacatgctggctact

SEQ ID NO: 1888037 - DNA, 15 bp, Homo sapiens
acatgctggctactg

SEQ ID NO: 1888038 - DNA, 15 bp, Homo sapiens
catgctggctactgt

SEQ ID NO: 1888039 - DNA, 15 bp, Homo sapiens
atgctggctactgta

SEQ ID NO: 1888040 - DNA, 15 bp, Homo sapiens
tgctggctactgtac

SEQ ID NO: 1888041 - DNA, 15 bp, Homo sapiens
gctggctactgtact

SEQ ID NO: 1888042 - DNA, 15 bp, Homo sapiens
ctggctactgtactg

SEQ ID NO: 1888043 - DNA, 15 bp, Homo sapiens
tggctactgtactga

SEQ ID NO: 1888044 - DNA, 15 bp, Homo sapiens
ggctactgtactgag

SEQ ID NO: 1888045 - DNA, 15 bp, Homo sapiens
gctactgtactgagc

SEQ ID NO: 1888046 - DNA, 15 bp, Homo sapiens
ctactgtactgagca

SEQ ID NO: 1888047 - DNA, 15 bp, Homo sapiens
tactgtactgagcac

SEQ ID NO: 1888048 - DNA, 15 bp, Homo sapiens
actgtactgagcact

SEQ ID NO: 1888049 - DNA, 15 bp, Homo sapiens
ctgtactgagcactt

SEQ ID NO: 1888050 - DNA, 15 bp, Homo sapiens
tgtactgagcacttt

SEQ ID NO: 1888051 - DNA, 15 bp, Homo sapiens
gtactgagcacttta

SEQ ID NO: 1888052 - DNA, 15 bp, Homo sapiens
tactgagcactttac

SEQ ID NO: 1888053 - DNA, 15 bp, Homo sapiens
actgagcactttaca

SEQ ID NO: 1888054 - DNA, 15 bp, Homo sapiens
ctgagcactttacat

SEQ ID NO: 1888055 - DNA, 15 bp, Homo sapiens
tgagcactttacatg

SEQ ID NO: 1888056 - DNA, 15 bp, Homo sapiens
gagcactttacatgc

SEQ ID NO: 1888057 - DNA, 15 bp, Homo sapiens
agcactttacatgca

SEQ ID NO: 1888058 - DNA, 15 bp, Homo sapiens
gcactttacatgcat

SEQ ID NO: 1888059 - DNA, 15 bp, Homo sapiens
cactttacatgcatc

SEQ ID NO: 1888060 - DNA, 15 bp, Homo sapiens
actttacatgcatca

SEQ ID NO: 1888061 - DNA, 15 bp, Homo sapiens
ctttacatgcatcac

SEQ ID NO: 1888062 - DNA, 15 bp, Homo sapiens
tttacatgcatcacc

SEQ ID NO: 1888063 - DNA, 15 bp, Homo sapiens
ttacatgcatcacct

SEQ ID NO: 1888064 - DNA, 15 bp, Homo sapiens
tacatgcatcacctt

SEQ ID NO: 1888065 - DNA, 15 bp, Homo sapiens
acatgcatcacctta

SEQ ID NO: 1888066 - DNA, 15 bp, Homo sapiens
catgcatcaccttac

SEQ ID NO: 1888067 - DNA, 15 bp, Homo sapiens
atgcatcaccttact

SEQ ID NO: 1888068 - DNA, 15 bp, Homo sapiens
tgcatcaccttactt

SEQ ID NO: 1888069 - DNA, 15 bp, Homo sapiens
gcatcaccttactta

SEQ ID NO: 1888070 - DNA, 15 bp, Homo sapiens
catcaccttacttaa

SEQ ID NO: 1888071 - DNA, 15 bp, Homo sapiens
atcaccttacttaac

SEQ ID NO: 1888072 - DNA, 15 bp, Homo sapiens
tcaccttacttaacc

SEQ ID NO: 1888073 - DNA, 15 bp, Homo sapiens
caccttacttaacct

SEQ ID NO: 1888074 - DNA, 15 bp, Homo sapiens
accttacttaacctt

SEQ ID NO: 1888075 - DNA, 15 bp, Homo sapiens
ccttacttaaccttc

SEQ ID NO: 1888076 - DNA, 15 bp, Homo sapiens
cttacttaaccttca

SEQ ID NO: 1888077 - DNA, 15 bp, Homo sapiens
ttacttaaccttcac

SEQ ID NO: 1888078 - DNA, 15 bp, Homo sapiens
tacttaaccttcaca

SEQ ID NO: 1888079 - DNA, 15 bp, Homo sapiens
acttaaccttcacaa

SEQ ID NO: 1888080 - DNA, 15 bp, Homo sapiens
cttaaccttcacaac

SEQ ID NO: 1888081 - DNA, 15 bp, Homo sapiens
ttaaccttcacaaca

SEQ ID NO: 1888082 - DNA, 15 bp, Homo sapiens
taaccttcacaacaa

SEQ ID NO: 1888083 - DNA, 15 bp, Homo sapiens
aaccttcacaacaac

SEQ ID NO: 1888084 - DNA, 15 bp, Homo sapiens
accttcacaacaaca

SEQ ID NO: 1888085 - DNA, 15 bp, Homo sapiens
ccttcacaacaacac

SEQ ID NO: 1888086 - DNA, 15 bp, Homo sapiens
cttcacaacaacact

SEQ ID NO: 1888087 - DNA, 15 bp, Homo sapiens
ttcacaacaacactg

SEQ ID NO: 1888088 - DNA, 15 bp, Homo sapiens
tcacaacaacactgt

SEQ ID NO: 1888089 - DNA, 15 bp, Homo sapiens
cacaacaacactgtg

SEQ ID NO: 1888090 - DNA, 15 bp, Homo sapiens
acaacaacactgtga

SEQ ID NO: 1888091 - DNA, 15 bp, Homo sapiens
caacaacactgtgaa

SEQ ID NO: 1888092 - DNA, 15 bp, Homo sapiens
aacaacactgtgaac

SEQ ID NO: 1888093 - DNA, 15 bp, Homo sapiens
acaacactgtgaaca

SEQ ID NO: 1888094 - DNA, 15 bp, Homo sapiens
caacactgtgaacaa

SEQ ID NO: 1888095 - DNA, 15 bp, Homo sapiens
aacactgtgaacaaa

SEQ ID NO: 1888096 - DNA, 15 bp, Homo sapiens
acactgtgaacaaag

SEQ ID NO: 1888097 - DNA, 15 bp, Homo sapiens
cactgtgaacaaaga

SEQ ID NO: 1888098 - DNA, 15 bp, Homo sapiens
actgtgaacaaagat

SEQ ID NO: 1888099 - DNA, 15 bp, Homo sapiens
ctgtgaacaaagatt

SEQ ID NO: 1888100 - DNA, 15 bp, Homo sapiens
tgtgaacaaagattc

SEQ ID NO: 1888101 - DNA, 15 bp, Homo sapiens
gtgaacaaagattcc

SEQ ID NO: 1888102 - DNA, 15 bp, Homo sapiens
tgaacaaagattcca

SEQ ID NO: 1888103 - DNA, 15 bp, Homo sapiens
gaacaaagattccat

SEQ ID NO: 1888104 - DNA, 15 bp, Homo sapiens
aacaaagattccatg

SEQ ID NO: 1888105 - DNA, 15 bp, Homo sapiens
acaaagattccatgt

SEQ ID NO: 1888106 - DNA, 15 bp, Homo sapiens
caaagattccatgtt

SEQ ID NO: 1888107 - DNA, 15 bp, Homo sapiens
aaagattccatgttg

SEQ ID NO: 1888108 - DNA, 15 bp, Homo sapiens
aagattccatgttgt

SEQ ID NO: 1888109 - DNA, 15 bp, Homo sapiens
agattccatgttgtt

SEQ ID NO: 1888110 - DNA, 15 bp, Homo sapiens
gattccatgttgttc

SEQ ID NO: 1888111 - DNA, 15 bp, Homo sapiens
attccatgttgttct

SEQ ID NO: 1888112 - DNA, 15 bp, Homo sapiens
ttccatgttgttctc

SEQ ID NO: 1888113 - DNA, 15 bp, Homo sapiens
tccatgttgttctcc

SEQ ID NO: 1888114 - DNA, 15 bp, Homo sapiens
ccatgttgttctcca

SEQ ID NO: 1888115 - DNA, 15 bp, Homo sapiens
catgttgttctccat

SEQ ID NO: 1888116 - DNA, 15 bp, Homo sapiens
atgttgttctccatc

SEQ ID NO: 1888117 - DNA, 15 bp, Homo sapiens
tgttgttctccatca

SEQ ID NO: 1888118 - DNA, 15 bp, Homo sapiens
gttgttctccatcag

SEQ ID NO: 1888119 - DNA, 15 bp, Homo sapiens
ttgttctccatcagg

SEQ ID NO: 1888120 - DNA, 15 bp, Homo sapiens
tgttctccatcaggg

SEQ ID NO: 1888121 - DNA, 15 bp, Homo sapiens
gttctccatcaggga

SEQ ID NO: 1888122 - DNA, 15 bp, Homo sapiens
ttctccatcagggag

SEQ ID NO: 1888123 - DNA, 15 bp, Homo sapiens
tctccatcagggagg

SEQ ID NO: 1888124 - DNA, 15 bp, Homo sapiens
ctccatcagggaggc

SEQ ID NO: 1888125 - DNA, 15 bp, Homo sapiens
tccatcagggaggca

SEQ ID NO: 1888126 - DNA, 15 bp, Homo sapiens
ccatcagggaggcag

SEQ ID NO: 1888127 - DNA, 15 bp, Homo sapiens
catcagggaggcaga

SEQ ID NO: 1888128 - DNA, 15 bp, Homo sapiens
atcagggaggcagag

SEQ ID NO: 1888129 - DNA, 15 bp, Homo sapiens
tcagggaggcagagt

SEQ ID NO: 1888130 - DNA, 15 bp, Homo sapiens
cagggaggcagagta

SEQ ID NO: 1888131 - DNA, 15 bp, Homo sapiens
agggaggcagagtaa

SEQ ID NO: 1888132 - DNA, 15 bp, Homo sapiens
gggaggcagagtaag

SEQ ID NO: 1888133 - DNA, 15 bp, Homo sapiens
ggaggcagagtaaga

SEQ ID NO: 1888134 - DNA, 15 bp, Homo sapiens
gaggcagagtaagaa

SEQ ID NO: 1888135 - DNA, 15 bp, Homo sapiens
aggcagagtaagaac

SEQ ID NO: 1888136 - DNA, 15 bp, Homo sapiens
ggcagagtaagaact

SEQ ID NO: 1888137 - DNA, 15 bp, Homo sapiens
gcagagtaagaactt

SEQ ID NO: 1888138 - DNA, 15 bp, Homo sapiens
cagagtaagaacttg

SEQ ID NO: 1888139 - DNA, 15 bp, Homo sapiens
agagtaagaacttgc

SEQ ID NO: 1888140 - DNA, 15 bp, Homo sapiens
gagtaagaacttgcc

SEQ ID NO: 1888141 - DNA, 15 bp, Homo sapiens
agtaagaacttgccc

SEQ ID NO: 1888142 - DNA, 15 bp, Homo sapiens
gtaagaacttgccca

SEQ ID NO: 1888143 - DNA, 15 bp, Homo sapiens
taagaacttgcccaa

SEQ ID NO: 1888144 - DNA, 15 bp, Homo sapiens
aagaacttgcccaaa

SEQ ID NO: 1888145 - DNA, 15 bp, Homo sapiens
agaacttgcccaaag

SEQ ID NO: 1888146 - DNA, 15 bp, Homo sapiens
gaacttgcccaaagt

SEQ ID NO: 1888147 - DNA, 15 bp, Homo sapiens
aacttgcccaaagtg

SEQ ID NO: 1888148 - DNA, 15 bp, Homo sapiens
acttgcccaaagtga

SEQ ID NO: 1888149 - DNA, 15 bp, Homo sapiens
cttgcccaaagtgac

SEQ ID NO: 1888150 - DNA, 15 bp, Homo sapiens
ttgcccaaagtgaca

SEQ ID NO: 1888151 - DNA, 15 bp, Homo sapiens
tgcccaaagtgacac

SEQ ID NO: 1888152 - DNA, 15 bp, Homo sapiens
gcccaaagtgacaca

SEQ ID NO: 1888153 - DNA, 15 bp, Homo sapiens
cccaaagtgacacac

SEQ ID NO: 1888154 - DNA, 15 bp, Homo sapiens
ccaaagtgacacact

SEQ ID NO: 1888155 - DNA, 15 bp, Homo sapiens
caaagtgacacacta

SEQ ID NO: 1888156 - DNA, 15 bp, Homo sapiens
aaagtgacacactaa

SEQ ID NO: 1888157 - DNA, 15 bp, Homo sapiens
aagtgacacactaat

SEQ ID NO: 1888158 - DNA, 15 bp, Homo sapiens
agtgacacactaata

SEQ ID NO: 1888159 - DNA, 15 bp, Homo sapiens
gtgacacactaatat

SEQ ID NO: 1888160 - DNA, 15 bp, Homo sapiens
tgacacactaatata

SEQ ID NO: 1888161 - DNA, 15 bp, Homo sapiens
gacacactaatataa

SEQ ID NO: 1888162 - DNA, 15 bp, Homo sapiens
acacactaatataaa

SEQ ID NO: 1888163 - DNA, 15 bp, Homo sapiens
cacactaatataaag

SEQ ID NO: 1888164 - DNA, 15 bp, Homo sapiens
acactaatataaagg

SEQ ID NO: 1888165 - DNA, 15 bp, Homo sapiens
cactaatataaaggg

SEQ ID NO: 1888166 - DNA, 15 bp, Homo sapiens
actaatataaagggt

SEQ ID NO: 1888167 - DNA, 15 bp, Homo sapiens
ctaatataaagggtg

SEQ ID NO: 1888168 - DNA, 15 bp, Homo sapiens
taatataaagggtga

SEQ ID NO: 1888169 - DNA, 15 bp, Homo sapiens
aatataaagggtgaa

SEQ ID NO: 1888170 - DNA, 15 bp, Homo sapiens
atataaagggtgaag

SEQ ID NO: 1888171 - DNA, 15 bp, Homo sapiens
tataaagggtgaagt

SEQ ID NO: 1888172 - DNA, 15 bp, Homo sapiens
ataaagggtgaagtc

SEQ ID NO: 1888173 - DNA, 15 bp, Homo sapiens
taaagggtgaagtcc

SEQ ID NO: 1888174 - DNA, 15 bp, Homo sapiens
aaagggtgaagtcca

SEQ ID NO: 1888175 - DNA, 15 bp, Homo sapiens
aagggtgaagtccac

SEQ ID NO: 1888176 - DNA, 15 bp, Homo sapiens
agggtgaagtccaca

SEQ ID NO: 1888177 - DNA, 15 bp, Homo sapiens
gggtgaagtccacat

SEQ ID NO: 1888178 - DNA, 15 bp, Homo sapiens
ggtgaagtccacatg

SEQ ID NO: 1888179 - DNA, 15 bp, Homo sapiens
gtgaagtccacatgt

SEQ ID NO: 1888180 - DNA, 15 bp, Homo sapiens
tgaagtccacatgtg

SEQ ID NO: 1888181 - DNA, 15 bp, Homo sapiens
gaagtccacatgtga

SEQ ID NO: 1888182 - DNA, 15 bp, Homo sapiens
aagtccacatgtgag

SEQ ID NO: 1888183 - DNA, 15 bp, Homo sapiens
agtccacatgtgagc

SEQ ID NO: 1888184 - DNA, 15 bp, Homo sapiens
gtccacatgtgagcc

SEQ ID NO: 1888185 - DNA, 15 bp, Homo sapiens
tccacatgtgagccc

SEQ ID NO: 1888186 - DNA, 15 bp, Homo sapiens
ccacatgtgagcccc

SEQ ID NO: 1888187 - DNA, 15 bp, Homo sapiens
cacatgtgagcccca

SEQ ID NO: 1888188 - DNA, 15 bp, Homo sapiens
acatgtgagccccat

SEQ ID NO: 1888189 - DNA, 15 bp, Homo sapiens
catgtgagccccatg

SEQ ID NO: 1888190 - DNA, 15 bp, Homo sapiens
atgtgagccccatgc

SEQ ID NO: 1888191 - DNA, 15 bp, Homo sapiens
tgtgagccccatgct

SEQ ID NO: 1888192 - DNA, 15 bp, Homo sapiens
gtgagccccatgctc

SEQ ID NO: 1888193 - DNA, 15 bp, Homo sapiens
tgagccccatgctct

SEQ ID NO: 1888194 - DNA, 15 bp, Homo sapiens
gagccccatgctctt

SEQ ID NO: 1888195 - DNA, 15 bp, Homo sapiens
agccccatgctctta

SEQ ID NO: 1888196 - DNA, 15 bp, Homo sapiens
gccccatgctcttaa

SEQ ID NO: 1888197 - DNA, 15 bp, Homo sapiens
ccccatgctcttaac

SEQ ID NO: 1888198 - DNA, 15 bp, Homo sapiens
cccatgctcttaaca

SEQ ID NO: 1888199 - DNA, 15 bp, Homo sapiens
ccatgctcttaacac

SEQ ID NO: 1888200 - DNA, 15 bp, Homo sapiens
catgctcttaacact

SEQ ID NO: 1888201 - DNA, 15 bp, Homo sapiens
atgctcttaacacta

SEQ ID NO: 1888202 - DNA, 15 bp, Homo sapiens
tgctcttaacactac

SEQ ID NO: 1888203 - DNA, 15 bp, Homo sapiens
gctcttaacactacg

SEQ ID NO: 1888204 - DNA, 15 bp, Homo sapiens
ctcttaacactacgc

SEQ ID NO: 1888205 - DNA, 15 bp, Homo sapiens
tcttaacactacgca

SEQ ID NO: 1888206 - DNA, 15 bp, Homo sapiens
cttaacactacgcat

SEQ ID NO: 1888207 - DNA, 15 bp, Homo sapiens
ttaacactacgcatc

SEQ ID NO: 1888208 - DNA, 15 bp, Homo sapiens
taacactacgcatcc

SEQ ID NO: 1888209 - DNA, 15 bp, Homo sapiens
aacactacgcatcct

SEQ ID NO: 1888210 - DNA, 15 bp, Homo sapiens
acactacgcatccta

SEQ ID NO: 1888211 - DNA, 15 bp, Homo sapiens
cactacgcatcctac

SEQ ID NO: 1888212 - DNA, 15 bp, Homo sapiens
actacgcatcctacc

SEQ ID NO: 1888213 - DNA, 15 bp, Homo sapiens
ctacgcatcctacct

SEQ ID NO: 1888214 - DNA, 15 bp, Homo sapiens
tacgcatcctacctc

SEQ ID NO: 1888215 - DNA, 15 bp, Homo sapiens
acgcatcctacctct

SEQ ID NO: 1888216 - DNA, 15 bp, Homo sapiens
cgcatcctacctctc

SEQ ID NO: 1888217 - DNA, 15 bp, Homo sapiens
gcatcctacctctca

SEQ ID NO: 1888218 - DNA, 15 bp, Homo sapiens
catcctacctctcaa

SEQ ID NO: 1888219 - DNA, 15 bp, Homo sapiens
atcctacctctcaag

SEQ ID NO: 1888220 - DNA, 15 bp, Homo sapiens
tcctacctctcaagc

SEQ ID NO: 1888221 - DNA, 15 bp, Homo sapiens
cctacctctcaagct

SEQ ID NO: 1888222 - DNA, 15 bp, Homo sapiens
ctacctctcaagcta

SEQ ID NO: 1888223 - DNA, 15 bp, Homo sapiens
tacctctcaagctaa

SEQ ID NO: 1888224 - DNA, 15 bp, Homo sapiens
acctctcaagctaaa

SEQ ID NO: 1888225 - DNA, 15 bp, Homo sapiens
cctctcaagctaaaa

SEQ ID NO: 1888226 - DNA, 15 bp, Homo sapiens
ctctcaagctaaaat

SEQ ID NO: 1888227 - DNA, 15 bp, Homo sapiens
tctcaagctaaaata

SEQ ID NO: 1888228 - DNA, 15 bp, Homo sapiens
ctcaagctaaaatac

SEQ ID NO: 1888229 - DNA, 15 bp, Homo sapiens
tcaagctaaaataca

SEQ ID NO: 1888230 - DNA, 15 bp, Homo sapiens
caagctaaaatacag

SEQ ID NO: 1888231 - DNA, 15 bp, Homo sapiens
aagctaaaatacaga

SEQ ID NO: 1888232 - DNA, 15 bp, Homo sapiens
agctaaaatacagat

SEQ ID NO: 1888233 - DNA, 15 bp, Homo sapiens
gctaaaatacagatg

SEQ ID NO: 1888234 - DNA, 15 bp, Homo sapiens
ctaaaatacagatgt

SEQ ID NO: 1888235 - DNA, 15 bp, Homo sapiens
taaaatacagatgtt

SEQ ID NO: 1888236 - DNA, 15 bp, Homo sapiens
aaatacagatgtttc

SEQ ID NO: 1888237 - DNA, 15 bp, Homo sapiens
aatacagatgtttct

SEQ ID NO: 1888238 - DNA, 15 bp, Homo sapiens
atacagatgtttctt

SEQ ID NO: 1888239 - DNA, 15 bp, Homo sapiens
tacagatgtttcttt

SEQ ID NO: 1888240 - DNA, 15 bp, Homo sapiens
acagatgtttctttt

SEQ ID NO: 1888241 - DNA, 15 bp, Homo sapiens
cagatgtttcttttg

SEQ ID NO: 1888242 - DNA, 15 bp, Homo sapiens
agatgtttcttttgt

SEQ ID NO: 1888243 - DNA, 15 bp, Homo sapiens
gatgtttcttttgta

SEQ ID NO: 1888244 - DNA, 15 bp, Homo sapiens
atgtttcttttgtac

SEQ ID NO: 1888245 - DNA, 15 bp, Homo sapiens
tgtttcttttgtacc

SEQ ID NO: 1888246 - DNA, 15 bp, Homo sapiens
gtttcttttgtacca

SEQ ID NO: 1888247 - DNA, 15 bp, Homo sapiens
tttcttttgtaccat

SEQ ID NO: 1888248 - DNA, 15 bp, Homo sapiens
ttcttttgtaccatt

SEQ ID NO: 1888249 - DNA, 15 bp, Homo sapiens
tcttttgtaccatta

SEQ ID NO: 1888250 - DNA, 15 bp, Homo sapiens
cttttgtaccattat

SEQ ID NO: 1888251 - DNA, 15 bp, Homo sapiens
ttttgtaccattatt

SEQ ID NO: 1888252 - DNA, 15 bp, Homo sapiens
tttgtaccattattt

SEQ ID NO: 1888253 - DNA, 15 bp, Homo sapiens
ttgtaccattatttt

SEQ ID NO: 1888254 - DNA, 15 bp, Homo sapiens
tgtaccattattttg

SEQ ID NO: 1888255 - DNA, 15 bp, Homo sapiens
gtaccattattttgt

SEQ ID NO: 1888256 - DNA, 15 bp, Homo sapiens
taccattattttgtg

SEQ ID NO: 1888257 - DNA, 15 bp, Homo sapiens
accattattttgtgt

SEQ ID NO: 1888258 - DNA, 15 bp, Homo sapiens
ccattattttgtgtc

SEQ ID NO: 1888259 - DNA, 15 bp, Homo sapiens
cattattttgtgtca

SEQ ID NO: 1888260 - DNA, 15 bp, Homo sapiens
attattttgtgtcag

SEQ ID NO: 1888261 - DNA, 15 bp, Homo sapiens
ttattttgtgtcagc

SEQ ID NO: 1888262 - DNA, 15 bp, Homo sapiens
tattttgtgtcagca

SEQ ID NO: 1888263 - DNA, 15 bp, Homo sapiens
attttgtgtcagcaa

SEQ ID NO: 1888264 - DNA, 15 bp, Homo sapiens
ttttgtgtcagcaac

SEQ ID NO: 1888265 - DNA, 15 bp, Homo sapiens
tttgtgtcagcaact

SEQ ID NO: 1888266 - DNA, 15 bp, Homo sapiens
ttgtgtcagcaacta

SEQ ID NO: 1888267 - DNA, 15 bp, Homo sapiens
tgtgtcagcaactac

SEQ ID NO: 1888268 - DNA, 15 bp, Homo sapiens
gtgtcagcaactaca

SEQ ID NO: 1888269 - DNA, 15 bp, Homo sapiens
tgtcagcaactacaa

SEQ ID NO: 1888270 - DNA, 15 bp, Homo sapiens
gtcagcaactacaaa

SEQ ID NO: 1888271 - DNA, 15 bp, Homo sapiens
tcagcaactacaaac

SEQ ID NO: 1888272 - DNA, 15 bp, Homo sapiens
cagcaactacaaaca

SEQ ID NO: 1888273 - DNA, 15 bp, Homo sapiens
agcaactacaaacag

SEQ ID NO: 1888274 - DNA, 15 bp, Homo sapiens
gcaactacaaacagg

SEQ ID NO: 1888275 - DNA, 15 bp, Homo sapiens
caactacaaacagga

SEQ ID NO: 1888276 - DNA, 15 bp, Homo sapiens
aactacaaacaggag

SEQ ID NO: 1888277 - DNA, 15 bp, Homo sapiens
actacaaacaggagt

SEQ ID NO: 1888278 - DNA, 15 bp, Homo sapiens
ctacaaacaggagtg

SEQ ID NO: 1888279 - DNA, 15 bp, Homo sapiens
tacaaacaggagtgc

SEQ ID NO: 1888280 - DNA, 15 bp, Homo sapiens
acaaacaggagtgca

SEQ ID NO: 1888281 - DNA, 15 bp, Homo sapiens
caaacaggagtgcat

SEQ ID NO: 1888282 - DNA, 15 bp, Homo sapiens
aaacaggagtgcatg

SEQ ID NO: 1888283 - DNA, 15 bp, Homo sapiens
aacaggagtgcatga

SEQ ID NO: 1888284 - DNA, 15 bp, Homo sapiens
acaggagtgcatgaa

SEQ ID NO: 1888285 - DNA, 15 bp, Homo sapiens
caggagtgcatgaac

SEQ ID NO: 1888286 - DNA, 15 bp, Homo sapiens
aggagtgcatgaacc

SEQ ID NO: 1888287 - DNA, 15 bp, Homo sapiens
ggagtgcatgaacca

SEQ ID NO: 1888288 - DNA, 15 bp, Homo sapiens
gagtgcatgaaccag

SEQ ID NO: 1888289 - DNA, 15 bp, Homo sapiens
agtgcatgaaccagt

SEQ ID NO: 1888290 - DNA, 15 bp, Homo sapiens
gtgcatgaaccagtt

SEQ ID NO: 1888291 - DNA, 15 bp, Homo sapiens
tgcatgaaccagttg

SEQ ID NO: 1888292 - DNA, 15 bp, Homo sapiens
gcatgaaccagttgg

SEQ ID NO: 1888293 - DNA, 15 bp, Homo sapiens
catgaaccagttggc

SEQ ID NO: 1888294 - DNA, 15 bp, Homo sapiens
atgaaccagttggcc

SEQ ID NO: 1888295 - DNA, 15 bp, Homo sapiens
tgaaccagttggcca

SEQ ID NO: 1888296 - DNA, 15 bp, Homo sapiens
gaaccagttggccac

SEQ ID NO: 1888297 - DNA, 15 bp, Homo sapiens
aaccagttggccact

SEQ ID NO: 1888298 - DNA, 15 bp, Homo sapiens
accagttggccactc

SEQ ID NO: 1888299 - DNA, 15 bp, Homo sapiens
ccagttggccactct

SEQ ID NO: 1888300 - DNA, 15 bp, Homo sapiens
cagttggccactctg

SEQ ID NO: 1888301 - DNA, 15 bp, Homo sapiens
agttggccactctgc

SEQ ID NO: 1888302 - DNA, 15 bp, Homo sapiens
gttggccactctgca

SEQ ID NO: 1888303 - DNA, 15 bp, Homo sapiens
ttggccactctgcat

SEQ ID NO: 1888304 - DNA, 15 bp, Homo sapiens
tggccactctgcatg

SEQ ID NO: 1888305 - DNA, 15 bp, Homo sapiens
ggccactctgcatgt

SEQ ID NO: 1888306 - DNA, 15 bp, Homo sapiens
gccactctgcatgtt

SEQ ID NO: 1888307 - DNA, 15 bp, Homo sapiens
ccactctgcatgttt

SEQ ID NO: 1888308 - DNA, 15 bp, Homo sapiens
cactctgcatgtttt

SEQ ID NO: 1888309 - DNA, 15 bp, Homo sapiens
actctgcatgttttg

SEQ ID NO: 1888310 - DNA, 15 bp, Homo sapiens
ctctgcatgttttgg

SEQ ID NO: 1888311 - DNA, 15 bp, Homo sapiens
tctgcatgttttggc

SEQ ID NO: 1888312 - DNA, 15 bp, Homo sapiens
ctgcatgttttggcg

SEQ ID NO: 1888313 - DNA, 15 bp, Homo sapiens
tgcatgttttggcgt

SEQ ID NO: 1888314 - DNA, 15 bp, Homo sapiens
gcatgttttggcgta

SEQ ID NO: 1888315 - DNA, 15 bp, Homo sapiens
catgttttggcgtaa

SEQ ID NO: 1888316 - DNA, 15 bp, Homo sapiens
atgttttggcgtaac

SEQ ID NO: 1888317 - DNA, 15 bp, Homo sapiens
tgttttggcgtaact

SEQ ID NO: 1888318 - DNA, 15 bp, Homo sapiens
gttttggcgtaactc

SEQ ID NO: 1888319 - DNA, 15 bp, Homo sapiens
ttttggcgtaactcc

SEQ ID NO: 1888320 - DNA, 15 bp, Homo sapiens
tttggcgtaactcct

SEQ ID NO: 1888321 - DNA, 15 bp, Homo sapiens
ttggcgtaactcctt

SEQ ID NO: 1888322 - DNA, 15 bp, Homo sapiens
tggcgtaactccttg

SEQ ID NO: 1888323 - DNA, 15 bp, Homo sapiens
ggcgtaactccttgc

SEQ ID NO: 1888324 - DNA, 15 bp, Homo sapiens
gcgtaactccttgcc

SEQ ID NO: 1888325 - DNA, 15 bp, Homo sapiens
cgtaactccttgcct

SEQ ID NO: 1888326 - DNA, 15 bp, Homo sapiens
gtaactccttgcctt

SEQ ID NO: 1888327 - DNA, 15 bp, Homo sapiens
taactccttgccttt

SEQ ID NO: 1888328 - DNA, 15 bp, Homo sapiens
aactccttgcctttc

SEQ ID NO: 1888329 - DNA, 15 bp, Homo sapiens
actccttgcctttct

SEQ ID NO: 1888330 - DNA, 15 bp, Homo sapiens
ctccttgcctttctg

SEQ ID NO: 1888331 - DNA, 15 bp, Homo sapiens
tccttgcctttctgc

SEQ ID NO: 1888332 - DNA, 15 bp, Homo sapiens
ccttgcctttctgca

SEQ ID NO: 1888333 - DNA, 15 bp, Homo sapiens
cttgcctttctgcat

SEQ ID NO: 1888334 - DNA, 15 bp, Homo sapiens
ttgcctttctgcatg

SEQ ID NO: 1888335 - DNA, 15 bp, Homo sapiens
tgcctttctgcatga

SEQ ID NO: 1888336 - DNA, 15 bp, Homo sapiens
gcctttctgcatgag

SEQ ID NO: 1888337 - DNA, 15 bp, Homo sapiens
cctttctgcatgagc

SEQ ID NO: 1888338 - DNA, 15 bp, Homo sapiens
ctttctgcatgagct

SEQ ID NO: 1888339 - DNA, 15 bp, Homo sapiens
tttctgcatgagctc

SEQ ID NO: 1888340 - DNA, 15 bp, Homo sapiens
ttctgcatgagctcc

SEQ ID NO: 1888341 - DNA, 15 bp, Homo sapiens
tctgcatgagctcct

SEQ ID NO: 1888342 - DNA, 15 bp, Homo sapiens
ctgcatgagctccta

SEQ ID NO: 1888343 - DNA, 15 bp, Homo sapiens
tgcatgagctcctac

SEQ ID NO: 1888344 - DNA, 15 bp, Homo sapiens
gcatgagctcctaca

SEQ ID NO: 1888345 - DNA, 15 bp, Homo sapiens
catgagctcctacag

SEQ ID NO: 1888346 - DNA, 15 bp, Homo sapiens
atgagctcctacagt

SEQ ID NO: 1888347 - DNA, 15 bp, Homo sapiens
tgagctcctacagtc

SEQ ID NO: 1888348 - DNA, 15 bp, Homo sapiens
gagctcctacagtct

SEQ ID NO: 1888349 - DNA, 15 bp, Homo sapiens
agctcctacagtcta

SEQ ID NO: 1888350 - DNA, 15 bp, Homo sapiens
gctcctacagtctat

SEQ ID NO: 1888351 - DNA, 15 bp, Homo sapiens
ctcctacagtctatt

SEQ ID NO: 1888352 - DNA, 15 bp, Homo sapiens
tcctacagtctatta

SEQ ID NO: 1888353 - DNA, 15 bp, Homo sapiens
cctacagtctattac

SEQ ID NO: 1888354 - DNA, 15 bp, Homo sapiens
ctacagtctattacc

SEQ ID NO: 1888355 - DNA, 15 bp, Homo sapiens
tacagtctattacca

SEQ ID NO: 1888356 - DNA, 15 bp, Homo sapiens
acagtctattaccat

SEQ ID NO: 1888357 - DNA, 15 bp, Homo sapiens
cagtctattaccatg

SEQ ID NO: 1888358 - DNA, 15 bp, Homo sapiens
agtctattaccatgt

SEQ ID NO: 1888359 - DNA, 15 bp, Homo sapiens
gtctattaccatgtc

SEQ ID NO: 1888360 - DNA, 15 bp, Homo sapiens
tctattaccatgtcc

SEQ ID NO: 1888361 - DNA, 15 bp, Homo sapiens
ctattaccatgtcct

SEQ ID NO: 1888362 - DNA, 15 bp, Homo sapiens
tattaccatgtcctt

SEQ ID NO: 1888363 - DNA, 15 bp, Homo sapiens
attaccatgtccttg

SEQ ID NO: 1888364 - DNA, 15 bp, Homo sapiens
ttaccatgtccttgg

SEQ ID NO: 1888365 - DNA, 15 bp, Homo sapiens
taccatgtccttggc

SEQ ID NO: 1888366 - DNA, 15 bp, Homo sapiens
accatgtccttggct

SEQ ID NO: 1888367 - DNA, 15 bp, Homo sapiens
ccatgtccttggctt

SEQ ID NO: 1888368 - DNA, 15 bp, Homo sapiens
catgtccttggcttt

SEQ ID NO: 1888369 - DNA, 15 bp, Homo sapiens
atgtccttggctttg

SEQ ID NO: 1888370 - DNA, 15 bp, Homo sapiens
tgtccttggctttgt

SEQ ID NO: 1888371 - DNA, 15 bp, Homo sapiens
gtccttggctttgta

SEQ ID NO: 1888372 - DNA, 15 bp, Homo sapiens
tccttggctttgtaa

SEQ ID NO: 1888373 - DNA, 15 bp, Homo sapiens
ccttggctttgtaat

SEQ ID NO: 1888374 - DNA, 15 bp, Homo sapiens
cttggctttgtaatt

SEQ ID NO: 1888375 - DNA, 15 bp, Homo sapiens
ttggctttgtaattg

SEQ ID NO: 1888376 - DNA, 15 bp, Homo sapiens
tggctttgtaattga

SEQ ID NO: 1888377 - DNA, 15 bp, Homo sapiens
ggctttgtaattgat

SEQ ID NO: 1888378 - DNA, 15 bp, Homo sapiens
gctttgtaattgatg

SEQ ID NO: 1888379 - DNA, 15 bp, Homo sapiens
ctttgtaattgatgg

SEQ ID NO: 1888380 - DNA, 15 bp, Homo sapiens
tttgtaattgatggt

SEQ ID NO: 1888381 - DNA, 15 bp, Homo sapiens
ttgtaattgatggtg

SEQ ID NO: 1888382 - DNA, 15 bp, Homo sapiens
tgtaattgatggtgg

SEQ ID NO: 1888383 - DNA, 15 bp, Homo sapiens
gtaattgatggtggc

SEQ ID NO: 1888384 - DNA, 15 bp, Homo sapiens
taattgatggtggct

SEQ ID NO: 1888385 - DNA, 15 bp, Homo sapiens
aattgatggtggcta

SEQ ID NO: 1888386 - DNA, 15 bp, Homo sapiens
attgatggtggctat

SEQ ID NO: 1888387 - DNA, 15 bp, Homo sapiens
ttgatggtggctatt

SEQ ID NO: 1888388 - DNA, 15 bp, Homo sapiens
tgatggtggctatta

SEQ ID NO: 1888389 - DNA, 15 bp, Homo sapiens
gatggtggctattat

SEQ ID NO: 1888390 - DNA, 15 bp, Homo sapiens
atggtggctattatc

SEQ ID NO: 1888391 - DNA, 15 bp, Homo sapiens
tggtggctattatct

SEQ ID NO: 1888392 - DNA, 15 bp, Homo sapiens
ggtggctattatctg

SEQ ID NO: 1888393 - DNA, 15 bp, Homo sapiens
gtggctattatctga

SEQ ID NO: 1888394 - DNA, 15 bp, Homo sapiens
tggctattatctgaa

SEQ ID NO: 1888395 - DNA, 15 bp, Homo sapiens
ggctattatctgaat

SEQ ID NO: 1888396 - DNA, 15 bp, Homo sapiens
gctattatctgaatg

SEQ ID NO: 1888397 - DNA, 15 bp, Homo sapiens
ctattatctgaatga

SEQ ID NO: 1888398 - DNA, 15 bp, Homo sapiens
tattatctgaatgaa

SEQ ID NO: 1888399 - DNA, 15 bp, Homo sapiens
attatctgaatgaac

SEQ ID NO: 1888400 - DNA, 15 bp, Homo sapiens
ttatctgaatgaaca

SEQ ID NO: 1888401 - DNA, 15 bp, Homo sapiens
tatctgaatgaacag

SEQ ID NO: 1888402 - DNA, 15 bp, Homo sapiens
atctgaatgaacagg

SEQ ID NO: 1888403 - DNA, 15 bp, Homo sapiens
tctgaatgaacaggt

SEQ ID NO: 1888404 - DNA, 15 bp, Homo sapiens
ctgaatgaacaggtg

SEQ ID NO: 1888405 - DNA, 15 bp, Homo sapiens
tgaatgaacaggtgt

SEQ ID NO: 1888406 - DNA, 15 bp, Homo sapiens
gaatgaacaggtgtg

SEQ ID NO: 1888407 - DNA, 15 bp, Homo sapiens
aatgaacaggtgtgc

SEQ ID NO: 1888408 - DNA, 15 bp, Homo sapiens
atgaacaggtgtgca

SEQ ID NO: 1888409 - DNA, 15 bp, Homo sapiens
tgaacaggtgtgcaa

SEQ ID NO: 1888410 - DNA, 15 bp, Homo sapiens
gaacaggtgtgcaac

SEQ ID NO: 1888411 - DNA, 15 bp, Homo sapiens
aacaggtgtgcaact

SEQ ID NO: 1888412 - DNA, 15 bp, Homo sapiens
acaggtgtgcaactg

SEQ ID NO: 1888413 - DNA, 15 bp, Homo sapiens
caggtgtgcaactgc

SEQ ID NO: 1888414 - DNA, 15 bp, Homo sapiens
aggtgtgcaactgct

SEQ ID NO: 1888415 - DNA, 15 bp, Homo sapiens
ggtgtgcaactgctt

SEQ ID NO: 1888416 - DNA, 15 bp, Homo sapiens
gtgtgcaactgctta

SEQ ID NO: 1888417 - DNA, 15 bp, Homo sapiens
tgtgcaactgcttat

SEQ ID NO: 1888418 - DNA, 15 bp, Homo sapiens
gtgcaactgcttata

SEQ ID NO: 1888419 - DNA, 15 bp, Homo sapiens
tgcaactgcttatat

SEQ ID NO: 1888420 - DNA, 15 bp, Homo sapiens
gcaactgcttatatt

SEQ ID NO: 1888421 - DNA, 15 bp, Homo sapiens
caactgcttatattc

SEQ ID NO: 1888422 - DNA, 15 bp, Homo sapiens
aactgcttatattct

SEQ ID NO: 1888423 - DNA, 15 bp, Homo sapiens
actgcttatattctc

SEQ ID NO: 1888424 - DNA, 15 bp, Homo sapiens
ctgcttatattctct

SEQ ID NO: 1888425 - DNA, 15 bp, Homo sapiens
tgcttatattctctt

SEQ ID NO: 1888426 - DNA, 15 bp, Homo sapiens
gcttatattctcttg

SEQ ID NO: 1888427 - DNA, 15 bp, Homo sapiens
cttatattctcttgg

SEQ ID NO: 1888428 - DNA, 15 bp, Homo sapiens
ttatattctcttggc

SEQ ID NO: 1888429 - DNA, 15 bp, Homo sapiens
tatattctcttggct

SEQ ID NO: 1888430 - DNA, 15 bp, Homo sapiens
atattctcttggctg

SEQ ID NO: 1888431 - DNA, 15 bp, Homo sapiens
tattctcttggctga

SEQ ID NO: 1888432 - DNA, 15 bp, Homo sapiens
attctcttggctgaa

SEQ ID NO: 1888433 - DNA, 15 bp, Homo sapiens
ttctcttggctgaag

SEQ ID NO: 1888434 - DNA, 15 bp, Homo sapiens
tctcttggctgaaga

SEQ ID NO: 1888435 - DNA, 15 bp, Homo sapiens
ctcttggctgaagag

SEQ ID NO: 1888436 - DNA, 15 bp, Homo sapiens
tcttggctgaagagg

SEQ ID NO: 1888437 - DNA, 15 bp, Homo sapiens
cttggctgaagagga

SEQ ID NO: 1888438 - DNA, 15 bp, Homo sapiens
ttggctgaagaggaa

SEQ ID NO: 1888439 - DNA, 15 bp, Homo sapiens
tggctgaagaggaag

SEQ ID NO: 1888440 - DNA, 15 bp, Homo sapiens
ggctgaagaggaagc

SEQ ID NO: 1888441 - DNA, 15 bp, Homo sapiens
gctgaagaggaagca

SEQ ID NO: 1888442 - DNA, 15 bp, Homo sapiens
ctgaagaggaagcaa

SEQ ID NO: 1888443 - DNA, 15 bp, Homo sapiens
tgaagaggaagcaac

SEQ ID NO: 1888444 - DNA, 15 bp, Homo sapiens
gaagaggaagcaaca

SEQ ID NO: 1888445 - DNA, 15 bp, Homo sapiens
aagaggaagcaacaa

SEQ ID NO: 1888446 - DNA, 15 bp, Homo sapiens
agaggaagcaacaac

SEQ ID NO: 1888447 - DNA, 15 bp, Homo sapiens
gaggaagcaacaacc

SEQ ID NO: 1888448 - DNA, 15 bp, Homo sapiens
aggaagcaacaacca

SEQ ID NO: 1888449 - DNA, 15 bp, Homo sapiens
ggaagcaacaaccat

SEQ ID NO: 1888450 - DNA, 15 bp, Homo sapiens
gaagcaacaaccatt

SEQ ID NO: 1888451 - DNA, 15 bp, Homo sapiens
aagcaacaaccattg

SEQ ID NO: 1888452 - DNA, 15 bp, Homo sapiens
agcaacaaccattgc

SEQ ID NO: 1888453 - DNA, 15 bp, Homo sapiens
gcaacaaccattgct

SEQ ID NO: 1888454 - DNA, 15 bp, Homo sapiens
caacaaccattgctg

SEQ ID NO: 1888455 - DNA, 15 bp, Homo sapiens
aacaaccattgctga

SEQ ID NO: 1888456 - DNA, 15 bp, Homo sapiens
acaaccattgctgaa

SEQ ID NO: 1888457 - DNA, 15 bp, Homo sapiens
caaccattgctgaag

SEQ ID NO: 1888458 - DNA, 15 bp, Homo sapiens
aaccattgctgaagc

SEQ ID NO: 1888459 - DNA, 15 bp, Homo sapiens
accattgctgaagca

SEQ ID NO: 1888460 - DNA, 15 bp, Homo sapiens
ccattgctgaagcag

SEQ ID NO: 1888461 - DNA, 15 bp, Homo sapiens
cattgctgaagcaga

SEQ ID NO: 1888462 - DNA, 15 bp, Homo sapiens
attgctgaagcagaa

SEQ ID NO: 1888463 - DNA, 15 bp, Homo sapiens
ttgctgaagcagaaa

SEQ ID NO: 1888464 - DNA, 15 bp, Homo sapiens
tgctgaagcagaaaa

SEQ ID NO: 1888465 - DNA, 15 bp, Homo sapiens
gctgaagcagaaaaa

SEQ ID NO: 1888466 - DNA, 15 bp, Homo sapiens
ctgaagcagaaaaat

SEQ ID NO: 1888467 - DNA, 15 bp, Homo sapiens
tgaagcagaaaaatt

SEQ ID NO: 1888468 - DNA, 15 bp, Homo sapiens
gaagcagaaaaatta

SEQ ID NO: 1888469 - DNA, 15 bp, Homo sapiens
aagcagaaaaattat

SEQ ID NO: 1888470 - DNA, 15 bp, Homo sapiens
agcagaaaaattatt

SEQ ID NO: 1888471 - DNA, 15 bp, Homo sapiens
gcagaaaaattattt

SEQ ID NO: 1888472 - DNA, 15 bp, Homo sapiens
cagaaaaattattta

SEQ ID NO: 1888473 - DNA, 15 bp, Homo sapiens
agaaaaattatttaa

SEQ ID NO: 1888474 - DNA, 15 bp, Homo sapiens
gaaaaattatttaag

SEQ ID NO: 1888475 - DNA, 15 bp, Homo sapiens
aaaaattatttaagc

SEQ ID NO: 1888476 - DNA, 15 bp, Homo sapiens
aaaattatttaagca

SEQ ID NO: 1888477 - DNA, 15 bp, Homo sapiens
aaattatttaagcag

SEQ ID NO: 1888478 - DNA, 15 bp, Homo sapiens
aattatttaagcagg

SEQ ID NO: 1888479 - DNA, 15 bp, Homo sapiens
attatttaagcaggc

SEQ ID NO: 1888480 - DNA, 15 bp, Homo sapiens
ttatttaagcaggcc

SEQ ID NO: 1888481 - DNA, 15 bp, Homo sapiens
tatttaagcaggccc

SEQ ID NO: 1888482 - DNA, 15 bp, Homo sapiens
atttaagcaggccct

SEQ ID NO: 1888483 - DNA, 15 bp, Homo sapiens
tttaagcaggccctg

SEQ ID NO: 1888484 - DNA, 15 bp, Homo sapiens
ttaagcaggccctga

SEQ ID NO: 1888485 - DNA, 15 bp, Homo sapiens
taagcaggccctgaa

SEQ ID NO: 1888486 - DNA, 15 bp, Homo sapiens
aagcaggccctgaag

SEQ ID NO: 1888487 - DNA, 15 bp, Homo sapiens
agcaggccctgaagg

SEQ ID NO: 1888488 - DNA, 15 bp, Homo sapiens
gcaggccctgaaggc

SEQ ID NO: 1888489 - DNA, 15 bp, Homo sapiens
caggccctgaaggct

SEQ ID NO: 1888490 - DNA, 15 bp, Homo sapiens
aggccctgaaggctg

SEQ ID NO: 1888491 - DNA, 15 bp, Homo sapiens
ggccctgaaggctgg

SEQ ID NO: 1888492 - DNA, 15 bp, Homo sapiens
gccctgaaggctgga

SEQ ID NO: 1888493 - DNA, 15 bp, Homo sapiens
ccctgaaggctggag

SEQ ID NO: 1888494 - DNA, 15 bp, Homo sapiens
cctgaaggctggaga

SEQ ID NO: 1888495 - DNA, 15 bp, Homo sapiens
ctgaaggctggagat

SEQ ID NO: 1888496 - DNA, 15 bp, Homo sapiens
tgaaggctggagatg

SEQ ID NO: 1888497 - DNA, 15 bp, Homo sapiens
gaaggctggagatgg

SEQ ID NO: 1888498 - DNA, 15 bp, Homo sapiens
aaggctggagatggc

SEQ ID NO: 1888499 - DNA, 15 bp, Homo sapiens
aggctggagatggct

SEQ ID NO: 1888500 - DNA, 15 bp, Homo sapiens
ggctggagatggctg

SEQ ID NO: 1888501 - DNA, 15 bp, Homo sapiens
gctggagatggctgt

SEQ ID NO: 1888502 - DNA, 15 bp, Homo sapiens
ctggagatggctgtt

SEQ ID NO: 1888503 - DNA, 15 bp, Homo sapiens
tggagatggctgtta

SEQ ID NO: 1888504 - DNA, 15 bp, Homo sapiens
ggagatggctgttac

SEQ ID NO: 1888505 - DNA, 15 bp, Homo sapiens
gagatggctgttacc

SEQ ID NO: 1888506 - DNA, 15 bp, Homo sapiens
agatggctgttaccg

SEQ ID NO: 1888507 - DNA, 15 bp, Homo sapiens
gatggctgttaccga

SEQ ID NO: 1888508 - DNA, 15 bp, Homo sapiens
atggctgttaccgac

SEQ ID NO: 1888509 - DNA, 15 bp, Homo sapiens
tggctgttaccgacg

SEQ ID NO: 1888510 - DNA, 15 bp, Homo sapiens
ggctgttaccgacgc

SEQ ID NO: 1888511 - DNA, 15 bp, Homo sapiens
gctgttaccgacgct

SEQ ID NO: 1888512 - DNA, 15 bp, Homo sapiens
ctgttaccgacgctc

SEQ ID NO: 1888513 - DNA, 15 bp, Homo sapiens
tgttaccgacgctct

SEQ ID NO: 1888514 - DNA, 15 bp, Homo sapiens
gttaccgacgctctc

SEQ ID NO: 1888515 - DNA, 15 bp, Homo sapiens
ttaccgacgctctca

SEQ ID NO: 1888516 - DNA, 15 bp, Homo sapiens
taccgacgctctcag

SEQ ID NO: 1888517 - DNA, 15 bp, Homo sapiens
accgacgctctcagc

SEQ ID NO: 1888518 - DNA, 15 bp, Homo sapiens
ccgacgctctcagca

SEQ ID NO: 1888519 - DNA, 15 bp, Homo sapiens
cgacgctctcagcag

SEQ ID NO: 1888520 - DNA, 15 bp, Homo sapiens
gacgctctcagcagc

SEQ ID NO: 1888521 - DNA, 15 bp, Homo sapiens
acgctctcagcagct

SEQ ID NO: 1888522 - DNA, 15 bp, Homo sapiens
cgctctcagcagcta

SEQ ID NO: 1888523 - DNA, 15 bp, Homo sapiens
gctctcagcagctac

SEQ ID NO: 1888524 - DNA, 15 bp, Homo sapiens
ctctcagcagctaca

SEQ ID NO: 1888525 - DNA, 15 bp, Homo sapiens
tctcagcagctacaa

SEQ ID NO: 1888526 - DNA, 15 bp, Homo sapiens
ctcagcagctacaac

SEQ ID NO: 1888527 - DNA, 15 bp, Homo sapiens
tcagcagctacaaca

SEQ ID NO: 1888528 - DNA, 15 bp, Homo sapiens
cagcagctacaacat

SEQ ID NO: 1888529 - DNA, 15 bp, Homo sapiens
agcagctacaacatc

SEQ ID NO: 1888530 - DNA, 15 bp, Homo sapiens
gcagctacaacatca

SEQ ID NO: 1888531 - DNA, 15 bp, Homo sapiens
cagctacaacatcat

SEQ ID NO: 1888532 - DNA, 15 bp, Homo sapiens
agctacaacatcatg

SEQ ID NO: 1888533 - DNA, 15 bp, Homo sapiens
gctacaacatcatgg

SEQ ID NO: 1888534 - DNA, 15 bp, Homo sapiens
ctacaacatcatgga

SEQ ID NO: 1888535 - DNA, 15 bp, Homo sapiens
tacaacatcatggat

SEQ ID NO: 1888536 - DNA, 15 bp, Homo sapiens
acaacatcatggatc

SEQ ID NO: 1888537 - DNA, 15 bp, Homo sapiens
caacatcatggatcc

SEQ ID NO: 1888538 - DNA, 15 bp, Homo sapiens
aacatcatggatccc

SEQ ID NO: 1888539 - DNA, 15 bp, Homo sapiens
acatcatggatccca

SEQ ID NO: 1888540 - DNA, 15 bp, Homo sapiens
catcatggatcccag

SEQ ID NO: 1888541 - DNA, 15 bp, Homo sapiens
atcatggatcccagt

SEQ ID NO: 1888542 - DNA, 15 bp, Homo sapiens
tcatggatcccagta

SEQ ID NO: 1888543 - DNA, 15 bp, Homo sapiens
catggatcccagtat

SEQ ID NO: 1888544 - DNA, 15 bp, Homo sapiens
atggatcccagtatg

SEQ ID NO: 1888545 - DNA, 15 bp, Homo sapiens
tggatcccagtatga

SEQ ID NO: 1888546 - DNA, 15 bp, Homo sapiens
ggatcccagtatgaa

SEQ ID NO: 1888547 - DNA, 15 bp, Homo sapiens
gatcccagtatgaag

SEQ ID NO: 1888548 - DNA, 15 bp, Homo sapiens
tcagcagttgtcaat

SEQ ID NO: 1888549 - DNA, 15 bp, Homo sapiens
cagcagttgtcaata

SEQ ID NO: 1888550 - DNA, 15 bp, Homo sapiens
agcagttgtcaatag

SEQ ID NO: 1888551 - DNA, 15 bp, Homo sapiens
gcagttgtcaataga

SEQ ID NO: 1888552 - DNA, 15 bp, Homo sapiens
cagttgtcaatagag

SEQ ID NO: 1888553 - DNA, 15 bp, Homo sapiens
agttgtcaatagagt

SEQ ID NO: 1888554 - DNA, 15 bp, Homo sapiens
gttgtcaatagagta

SEQ ID NO: 1888555 - DNA, 15 bp, Homo sapiens
ttgtcaatagagtac

SEQ ID NO: 1888556 - DNA, 15 bp, Homo sapiens
tgtcaatagagtaca

SEQ ID NO: 1888557 - DNA, 15 bp, Homo sapiens
gtcaatagagtacag

SEQ ID NO: 1888558 - DNA, 15 bp, Homo sapiens
tcaatagagtacaga

SEQ ID NO: 1888559 - DNA, 15 bp, Homo sapiens
caatagagtacagat

SEQ ID NO: 1888560 - DNA, 15 bp, Homo sapiens
aatagagtacagatg

SEQ ID NO: 1888561 - DNA, 15 bp, Homo sapiens
atagagtacagatga

SEQ ID NO: 1888562 - DNA, 15 bp, Homo sapiens
tagagtacagatgac

SEQ ID NO: 1888563 - DNA, 15 bp, Homo sapiens
agagtacagatgacc

SEQ ID NO: 1888564 - DNA, 15 bp, Homo sapiens
gagtacagatgacct

SEQ ID NO: 1888565 - DNA, 15 bp, Homo sapiens
agtacagatgaccta

SEQ ID NO: 1888566 - DNA, 15 bp, Homo sapiens
gtacagatgacctaa

SEQ ID NO: 1888567 - DNA, 15 bp, Homo sapiens
tacagatgacctaac

SEQ ID NO: 1888568 - DNA, 15 bp, Homo sapiens
acagatgacctaaca

SEQ ID NO: 1888569 - DNA, 15 bp, Homo sapiens
cagatgacctaacac

SEQ ID NO: 1888570 - DNA, 15 bp, Homo sapiens
agatgacctaacacc

SEQ ID NO: 1888571 - DNA, 15 bp, Homo sapiens
gatgacctaacaccg

SEQ ID NO: 1888572 - DNA, 15 bp, Homo sapiens
atgacctaacaccga

SEQ ID NO: 1888573 - DNA, 15 bp, Homo sapiens
tgacctaacaccgac

SEQ ID NO: 1888574 - DNA, 15 bp, Homo sapiens
gacctaacaccgact

SEQ ID NO: 1888575 - DNA, 15 bp, Homo sapiens
acctaacaccgactg

SEQ ID NO: 1888576 - DNA, 15 bp, Homo sapiens
cctaacaccgactga

SEQ ID NO: 1888577 - DNA, 15 bp, Homo sapiens
ctaacaccgactgaa

SEQ ID NO: 1888578 - DNA, 15 bp, Homo sapiens
taacaccgactgaat

SEQ ID NO: 1888579 - DNA, 15 bp, Homo sapiens
aacaccgactgaatt

SEQ ID NO: 1888580 - DNA, 15 bp, Homo sapiens
acaccgactgaattc

SEQ ID NO: 1888581 - DNA, 15 bp, Homo sapiens
caccgactgaattct

SEQ ID NO: 1888582 - DNA, 15 bp, Homo sapiens
accgactgaattctg

SEQ ID NO: 1888583 - DNA, 15 bp, Homo sapiens
ccgactgaattctga

SEQ ID NO: 1888584 - DNA, 15 bp, Homo sapiens
cgactgaattctgaa

SEQ ID NO: 1888585 - DNA, 15 bp, Homo sapiens
gactgaattctgaag

SEQ ID NO: 1888586 - DNA, 15 bp, Homo sapiens
actgaattctgaagg

SEQ ID NO: 1888587 - DNA, 15 bp, Homo sapiens
ctgaattctgaaggg

SEQ ID NO: 1888588 - DNA, 15 bp, Homo sapiens
tgaattctgaaggga

SEQ ID NO: 1888589 - DNA, 15 bp, Homo sapiens
gaattctgaagggag

SEQ ID NO: 1888590 - DNA, 15 bp, Homo sapiens
aattctgaagggagt

SEQ ID NO: 1888591 - DNA, 15 bp, Homo sapiens
attctgaagggagtt

SEQ ID NO: 1888592 - DNA, 15 bp, Homo sapiens
ttctgaagggagttt

SEQ ID NO: 1888593 - DNA, 15 bp, Homo sapiens
tctgaagggagtttt

SEQ ID NO: 1888594 - DNA, 15 bp, Homo sapiens
ctgaagggagttttg

SEQ ID NO: 1888595 - DNA, 15 bp, Homo sapiens
tgaagggagttttgg

SEQ ID NO: 1888596 - DNA, 15 bp, Homo sapiens
gaagggagttttggt

SEQ ID NO: 1888597 - DNA, 15 bp, Homo sapiens
aagggagttttggtg

SEQ ID NO: 1888598 - DNA, 15 bp, Homo sapiens
agggagttttggtgc

SEQ ID NO: 1888599 - DNA, 15 bp, Homo sapiens
gggagttttggtgct

SEQ ID NO: 1888600 - DNA, 15 bp, Homo sapiens
ggagttttggtgctg

SEQ ID NO: 1888601 - DNA, 15 bp, Homo sapiens
gagttttggtgctga

SEQ ID NO: 1888602 - DNA, 15 bp, Homo sapiens
agttttggtgctgac

SEQ ID NO: 1888603 - DNA, 15 bp, Homo sapiens
gttttggtgctgact

SEQ ID NO: 1888604 - DNA, 15 bp, Homo sapiens
ttttggtgctgactt

SEQ ID NO: 1888605 - DNA, 15 bp, Homo sapiens
tttggtgctgacttg

SEQ ID NO: 1888606 - DNA, 15 bp, Homo sapiens
ttggtgctgacttgg

SEQ ID NO: 1888607 - DNA, 15 bp, Homo sapiens
tggtgctgacttggc

SEQ ID NO: 1888608 - DNA, 15 bp, Homo sapiens
ggtgctgacttggct

SEQ ID NO: 1888609 - DNA, 15 bp, Homo sapiens
gtgctgacttggctc

SEQ ID NO: 1888610 - DNA, 15 bp, Homo sapiens
tgctgacttggctca

SEQ ID NO: 1888611 - DNA, 15 bp, Homo sapiens
gctgacttggctcag

SEQ ID NO: 1888612 - DNA, 15 bp, Homo sapiens
ctgacttggctcagg

SEQ ID NO: 1888613 - DNA, 15 bp, Homo sapiens
tgacttggctcaggc

SEQ ID NO: 1888614 - DNA, 15 bp, Homo sapiens
gacttggctcaggcc

SEQ ID NO: 1888615 - DNA, 15 bp, Homo sapiens
acttggctcaggcct

SEQ ID NO: 1888616 - DNA, 15 bp, Homo sapiens
cttggctcaggcctg

SEQ ID NO: 1888617 - DNA, 15 bp, Homo sapiens
ttggctcaggcctgt

SEQ ID NO: 1888618 - DNA, 15 bp, Homo sapiens
ggctcaggcctgtat

SEQ ID NO: 1888619 - DNA, 15 bp, Homo sapiens
gctcaggcctgtatc

SEQ ID NO: 1888620 - DNA, 15 bp, Homo sapiens
ctcaggcctgtatca

SEQ ID NO: 1888621 - DNA, 15 bp, Homo sapiens
tcaggcctgtatcat

SEQ ID NO: 1888622 - DNA, 15 bp, Homo sapiens
caggcctgtatcatt

SEQ ID NO: 1888623 - DNA, 15 bp, Homo sapiens
aggcctgtatcattt

SEQ ID NO: 1888624 - DNA, 15 bp, Homo sapiens
ggcctgtatcattta

SEQ ID NO: 1888625 - DNA, 15 bp, Homo sapiens
gcctgtatcatttac

SEQ ID NO: 1888626 - DNA, 15 bp, Homo sapiens
cctgtatcatttaca

SEQ ID NO: 1888627 - DNA, 15 bp, Homo sapiens
ctgtatcatttacag

SEQ ID NO: 1888628 - DNA, 15 bp, Homo sapiens
tgtatcatttacagt

SEQ ID NO: 1888629 - DNA, 15 bp, Homo sapiens
gtatcatttacagta

SEQ ID NO: 1888630 - DNA, 15 bp, Homo sapiens
tatcatttacagtag

SEQ ID NO: 1888631 - DNA, 15 bp, Homo sapiens
atcatttacagtaga

SEQ ID NO: 1888632 - DNA, 15 bp, Homo sapiens
tcatttacagtagaa

SEQ ID NO: 1888633 - DNA, 15 bp, Homo sapiens
catttacagtagaaa

SEQ ID NO: 1888634 - DNA, 15 bp, Homo sapiens
atttacagtagaaat

SEQ ID NO: 1888635 - DNA, 15 bp, Homo sapiens
tttacagtagaaata

SEQ ID NO: 1888636 - DNA, 15 bp, Homo sapiens
ttacagtagaaatat

SEQ ID NO: 1888637 - DNA, 15 bp, Homo sapiens
tacagtagaaatata

SEQ ID NO: 1888638 - DNA, 15 bp, Homo sapiens
acagtagaaatataa

SEQ ID NO: 1888639 - DNA, 15 bp, Homo sapiens
cagtagaaatataat

SEQ ID NO: 1888640 - DNA, 15 bp, Homo sapiens
agtagaaatataatg

SEQ ID NO: 1888641 - DNA, 15 bp, Homo sapiens
gtagaaatataatga

SEQ ID NO: 1888642 - DNA, 15 bp, Homo sapiens
tagaaatataatgaa

SEQ ID NO: 1888643 - DNA, 15 bp, Homo sapiens
agaaatataatgaag

SEQ ID NO: 1888644 - DNA, 15 bp, Homo sapiens
gaaatataatgaagt

SEQ ID NO: 1888645 - DNA, 15 bp, Homo sapiens
aaatataatgaagtg

SEQ ID NO: 1888646 - DNA, 15 bp, Homo sapiens
aatataatgaagtgg

SEQ ID NO: 1888647 - DNA, 15 bp, Homo sapiens
atataatgaagtggc

SEQ ID NO: 1888648 - DNA, 15 bp, Homo sapiens
tataatgaagtggct

SEQ ID NO: 1888649 - DNA, 15 bp, Homo sapiens
ataatgaagtggctg

SEQ ID NO: 1888650 - DNA, 15 bp, Homo sapiens
taatgaagtggctgc

SEQ ID NO: 1888651 - DNA, 15 bp, Homo sapiens
aatgaagtggctgct

SEQ ID NO: 1888652 - DNA, 15 bp, Homo sapiens
atgaagtggctgctg

SEQ ID NO: 1888653 - DNA, 15 bp, Homo sapiens
tgaagtggctgctga

SEQ ID NO: 1888654 - DNA, 15 bp, Homo sapiens
gaagtggctgctgaa

SEQ ID NO: 1888655 - DNA, 15 bp, Homo sapiens
aagtggctgctgaag

SEQ ID NO: 1888656 - DNA, 15 bp, Homo sapiens
agtggctgctgaagt

SEQ ID NO: 1888657 - DNA, 15 bp, Homo sapiens
gtggctgctgaagtt

SEQ ID NO: 1888658 - DNA, 15 bp, Homo sapiens
tggctgctgaagtta

SEQ ID NO: 1888659 - DNA, 15 bp, Homo sapiens
ggctgctgaagttac

SEQ ID NO: 1888660 - DNA, 15 bp, Homo sapiens
gctgctgaagttact

SEQ ID NO: 1888661 - DNA, 15 bp, Homo sapiens
ctgctgaagttactg

SEQ ID NO: 1888662 - DNA, 15 bp, Homo sapiens
tgctgaagttactgt

SEQ ID NO: 1888663 - DNA, 15 bp, Homo sapiens
gctgaagttactgtt

SEQ ID NO: 1888664 - DNA, 15 bp, Homo sapiens
ctgaagttactgttc

SEQ ID NO: 1888665 - DNA, 15 bp, Homo sapiens
tgaagttactgttct

SEQ ID NO: 1888666 - DNA, 15 bp, Homo sapiens
gaagttactgttctt

SEQ ID NO: 1888667 - DNA, 15 bp, Homo sapiens
aagttactgttcttg

SEQ ID NO: 1888668 - DNA, 15 bp, Homo sapiens
agttactgttcttga

SEQ ID NO: 1888669 - DNA, 15 bp, Homo sapiens
gttactgttcttgag

SEQ ID NO: 1888670 - DNA, 15 bp, Homo sapiens
ttactgttcttgagg

SEQ ID NO: 1888671 - DNA, 15 bp, Homo sapiens
tactgttcttgaggg

SEQ ID NO: 1888672 - DNA, 15 bp, Homo sapiens
actgttcttgagggt

SEQ ID NO: 1888673 - DNA, 15 bp, Homo sapiens
ctgttcttgagggtt

SEQ ID NO: 1888674 - DNA, 15 bp, Homo sapiens
tgttcttgagggttg

SEQ ID NO: 1888675 - DNA, 15 bp, Homo sapiens
gttcttgagggttga

SEQ ID NO: 1888676 - DNA, 15 bp, Homo sapiens
ttcttgagggttgag

SEQ ID NO: 1888677 - DNA, 15 bp, Homo sapiens
tcttgagggttgagc

SEQ ID NO: 1888678 - DNA, 15 bp, Homo sapiens
cttgagggttgagct

SEQ ID NO: 1888679 - DNA, 15 bp, Homo sapiens
ttgagggttgagctg

SEQ ID NO: 1888680 - DNA, 15 bp, Homo sapiens
tgagggttgagctgc

SEQ ID NO: 1888681 - DNA, 15 bp, Homo sapiens
gagggttgagctgca

SEQ ID NO: 1888682 - DNA, 15 bp, Homo sapiens
agggttgagctgcag

SEQ ID NO: 1888683 - DNA, 15 bp, Homo sapiens
gggttgagctgcagc

SEQ ID NO: 1888684 - DNA, 15 bp, Homo sapiens
ggttgagctgcagcc

SEQ ID NO: 1888685 - DNA, 15 bp, Homo sapiens
gttgagctgcagcca

SEQ ID NO: 1888686 - DNA, 15 bp, Homo sapiens
ttgagctgcagccac

SEQ ID NO: 1888687 - DNA, 15 bp, Homo sapiens
tgagctgcagccact

SEQ ID NO: 1888688 - DNA, 15 bp, Homo sapiens
gagctgcagccactg

SEQ ID NO: 1888689 - DNA, 15 bp, Homo sapiens
agctgcagccactga

SEQ ID NO: 1888690 - DNA, 15 bp, Homo sapiens
gctgcagccactgaa

SEQ ID NO: 1888691 - DNA, 15 bp, Homo sapiens
ctgcagccactgaag

SEQ ID NO: 1888692 - DNA, 15 bp, Homo sapiens
tgcagccactgaaga

SEQ ID NO: 1888693 - DNA, 15 bp, Homo sapiens
gcagccactgaagat

SEQ ID NO: 1888694 - DNA, 15 bp, Homo sapiens
cagccactgaagatt

SEQ ID NO: 1888695 - DNA, 15 bp, Homo sapiens
agccactgaagattg

SEQ ID NO: 1888696 - DNA, 15 bp, Homo sapiens
gccactgaagattgt

SEQ ID NO: 1888697 - DNA, 15 bp, Homo sapiens
ccactgaagattgtg

SEQ ID NO: 1888698 - DNA, 15 bp, Homo sapiens
cactgaagattgtgg

SEQ ID NO: 1888699 - DNA, 15 bp, Homo sapiens
actgaagattgtgga

SEQ ID NO: 1888700 - DNA, 15 bp, Homo sapiens
ctgaagattgtggaa

SEQ ID NO: 1888701 - DNA, 15 bp, Homo sapiens
tgaagattgtggaaa

SEQ ID NO: 1888702 - DNA, 15 bp, Homo sapiens
gaagattgtggaaaa

SEQ ID NO: 1888703 - DNA, 15 bp, Homo sapiens
aagattgtggaaaaa

SEQ ID NO: 1888704 - DNA, 15 bp, Homo sapiens
agattgtggaaaaac

SEQ ID NO: 1888705 - DNA, 15 bp, Homo sapiens
gattgtggaaaaaca

SEQ ID NO: 1888706 - DNA, 15 bp, Homo sapiens
attgtggaaaaacat

SEQ ID NO: 1888707 - DNA, 15 bp, Homo sapiens
ttgtggaaaaacatg

SEQ ID NO: 1888708 - DNA, 15 bp, Homo sapiens
tgtggaaaaacatgc

SEQ ID NO: 1888709 - DNA, 15 bp, Homo sapiens
gtggaaaaacatgcc

SEQ ID NO: 1888710 - DNA, 15 bp, Homo sapiens
tggaaaaacatgcct

SEQ ID NO: 1888711 - DNA, 15 bp, Homo sapiens
ggaaaaacatgcctc

SEQ ID NO: 1888712 - DNA, 15 bp, Homo sapiens
gaaaaacatgcctct

SEQ ID NO: 1888713 - DNA, 15 bp, Homo sapiens
aaaaacatgcctctt

SEQ ID NO: 1888714 - DNA, 15 bp, Homo sapiens
aaaacatgcctcttg

SEQ ID NO: 1888715 - DNA, 15 bp, Homo sapiens
aaacatgcctcttgt

SEQ ID NO: 1888716 - DNA, 15 bp, Homo sapiens
aacatgcctcttgtt

SEQ ID NO: 1888717 - DNA, 15 bp, Homo sapiens
acatgcctcttgttt

SEQ ID NO: 1888718 - DNA, 15 bp, Homo sapiens
catgcctcttgtttc

SEQ ID NO: 1888719 - DNA, 15 bp, Homo sapiens
atgcctcttgtttct

SEQ ID NO: 1888720 - DNA, 15 bp, Homo sapiens
tgcctcttgtttctc

SEQ ID NO: 1888721 - DNA, 15 bp, Homo sapiens
gcctcttgtttctca

SEQ ID NO: 1888722 - DNA, 15 bp, Homo sapiens
cctcttgtttctcac

SEQ ID NO: 1888723 - DNA, 15 bp, Homo sapiens
ctcttgtttctcacc

SEQ ID NO: 1888724 - DNA, 15 bp, Homo sapiens
tcttgtttctcaccc

SEQ ID NO: 1888725 - DNA, 15 bp, Homo sapiens
cttgtttctcacccc

SEQ ID NO: 1888726 - DNA, 15 bp, Homo sapiens
ttgtttctcacccca

SEQ ID NO: 1888727 - DNA, 15 bp, Homo sapiens
tgtttctcaccccat

SEQ ID NO: 1888728 - DNA, 15 bp, Homo sapiens
gtttctcaccccata

SEQ ID NO: 1888729 - DNA, 15 bp, Homo sapiens
tttctcaccccatat

SEQ ID NO: 1888730 - DNA, 15 bp, Homo sapiens
ttctcaccccatatc

SEQ ID NO: 1888731 - DNA, 15 bp, Homo sapiens
tctcaccccatatca

SEQ ID NO: 1888732 - DNA, 15 bp, Homo sapiens
ctcaccccatatcat

SEQ ID NO: 1888733 - DNA, 15 bp, Homo sapiens
tcaccccatatcatg

SEQ ID NO: 1888734 - DNA, 15 bp, Homo sapiens
caccccatatcatga

SEQ ID NO: 1888735 - DNA, 15 bp, Homo sapiens
accccatatcatgaa

SEQ ID NO: 1888736 - DNA, 15 bp, Homo sapiens
ccccatatcatgaaa

SEQ ID NO: 1888737 - DNA, 15 bp, Homo sapiens
cccatatcatgaaat

SEQ ID NO: 1888738 - DNA, 15 bp, Homo sapiens
ccatatcatgaaatg

SEQ ID NO: 1888739 - DNA, 15 bp, Homo sapiens
catatcatgaaatgg

SEQ ID NO: 1888740 - DNA, 15 bp, Homo sapiens
atatcatgaaatggg

SEQ ID NO: 1888741 - DNA, 15 bp, Homo sapiens
tatcatgaaatgggt

SEQ ID NO: 1888742 - DNA, 15 bp, Homo sapiens
atcatgaaatgggtt

SEQ ID NO: 1888743 - DNA, 15 bp, Homo sapiens
tcatgaaatgggttc

SEQ ID NO: 1888744 - DNA, 15 bp, Homo sapiens
catgaaatgggttct

SEQ ID NO: 1888745 - DNA, 15 bp, Homo sapiens
atgaaatgggttctt

SEQ ID NO: 1888746 - DNA, 15 bp, Homo sapiens
tgaaatgggttcttt

SEQ ID NO: 1888747 - DNA, 15 bp, Homo sapiens
gaaatgggttctttc

SEQ ID NO: 1888748 - DNA, 15 bp, Homo sapiens
aaatgggttctttca

SEQ ID NO: 1888749 - DNA, 15 bp, Homo sapiens
aatgggttctttcaa

SEQ ID NO: 1888750 - DNA, 15 bp, Homo sapiens
atgggttctttcaag

SEQ ID NO: 1888751 - DNA, 15 bp, Homo sapiens
tgggttctttcaagt

SEQ ID NO: 1888752 - DNA, 15 bp, Homo sapiens
gggttctttcaagtt

SEQ ID NO: 1888753 - DNA, 15 bp, Homo sapiens
ggttctttcaagttt

SEQ ID NO: 1888754 - DNA, 15 bp, Homo sapiens
gttctttcaagttta

SEQ ID NO: 1888755 - DNA, 15 bp, Homo sapiens
ttctttcaagtttat

SEQ ID NO: 1888756 - DNA, 15 bp, Homo sapiens
tctttcaagtttatc

SEQ ID NO: 1888757 - DNA, 15 bp, Homo sapiens
ctttcaagtttatcc

SEQ ID NO: 1888758 - DNA, 15 bp, Homo sapiens
tttcaagtttatccc

SEQ ID NO: 1888759 - DNA, 15 bp, Homo sapiens
ttcaagtttatccct

SEQ ID NO: 1888760 - DNA, 15 bp, Homo sapiens
tcaagtttatccctg

SEQ ID NO: 1888761 - DNA, 15 bp, Homo sapiens
caagtttatccctgc

SEQ ID NO: 1888762 - DNA, 15 bp, Homo sapiens
aagtttatccctgct

SEQ ID NO: 1888763 - DNA, 15 bp, Homo sapiens
agtttatccctgctg

SEQ ID NO: 1888764 - DNA, 15 bp, Homo sapiens
gtttatccctgctgc

SEQ ID NO: 1888765 - DNA, 15 bp, Homo sapiens
tttatccctgctgct

SEQ ID NO: 1888766 - DNA, 15 bp, Homo sapiens
ttatccctgctgctt

SEQ ID NO: 1888767 - DNA, 15 bp, Homo sapiens
tatccctgctgcttt

SEQ ID NO: 1888768 - DNA, 15 bp, Homo sapiens
atccctgctgctttt

SEQ ID NO: 1888769 - DNA, 15 bp, Homo sapiens
tccctgctgcttttc

SEQ ID NO: 1888770 - DNA, 15 bp, Homo sapiens
ccctgctgcttttcc

SEQ ID NO: 1888771 - DNA, 15 bp, Homo sapiens
cctgctgcttttcct

SEQ ID NO: 1888772 - DNA, 15 bp, Homo sapiens
ctgctgcttttcctg

SEQ ID NO: 1888773 - DNA, 15 bp, Homo sapiens
tgctgcttttcctgg

SEQ ID NO: 1888774 - DNA, 15 bp, Homo sapiens
gctgcttttcctgga

SEQ ID NO: 1888775 - DNA, 15 bp, Homo sapiens
ctgcttttcctggag

SEQ ID NO: 1888776 - DNA, 15 bp, Homo sapiens
tgcttttcctggaga

SEQ ID NO: 1888777 - DNA, 15 bp, Homo sapiens
gcttttcctggagac

SEQ ID NO: 1888778 - DNA, 15 bp, Homo sapiens
cttttcctggagacg

SEQ ID NO: 1888779 - DNA, 15 bp, Homo sapiens
ttttcctggagacgt

SEQ ID NO: 1888780 - DNA, 15 bp, Homo sapiens
tttcctggagacgtc

SEQ ID NO: 1888781 - DNA, 15 bp, Homo sapiens
ttcctggagacgtct

SEQ ID NO: 1888782 - DNA, 15 bp, Homo sapiens
tcctggagacgtcta

SEQ ID NO: 1888783 - DNA, 15 bp, Homo sapiens
cctggagacgtctac

SEQ ID NO: 1888784 - DNA, 15 bp, Homo sapiens
ctggagacgtctact

SEQ ID NO: 1888785 - DNA, 15 bp, Homo sapiens
tggagacgtctactg

SEQ ID NO: 1888786 - DNA, 15 bp, Homo sapiens
ggagacgtctactga

SEQ ID NO: 1888787 - DNA, 15 bp, Homo sapiens
gagacgtctactgag

SEQ ID NO: 1888788 - DNA, 15 bp, Homo sapiens
agacgtctactgagt

SEQ ID NO: 1888789 - DNA, 15 bp, Homo sapiens
gacgtctactgagtt

SEQ ID NO: 1888790 - DNA, 15 bp, Homo sapiens
acgtctactgagttg

SEQ ID NO: 1888791 - DNA, 15 bp, Homo sapiens
cgtctactgagttgc

SEQ ID NO: 1888792 - DNA, 15 bp, Homo sapiens
gtctactgagttgct

SEQ ID NO: 1888793 - DNA, 15 bp, Homo sapiens
tctactgagttgctg

SEQ ID NO: 1888794 - DNA, 15 bp, Homo sapiens
ctactgagttgctgg

SEQ ID NO: 1888795 - DNA, 15 bp, Homo sapiens
tactgagttgctggt

SEQ ID NO: 1888796 - DNA, 15 bp, Homo sapiens
actgagttgctggtt

SEQ ID NO: 1888797 - DNA, 15 bp, Homo sapiens
ctgagttgctggttc

SEQ ID NO: 1888798 - DNA, 15 bp, Homo sapiens
tgagttgctggttcc

SEQ ID NO: 1888799 - DNA, 15 bp, Homo sapiens
gagttgctggttcct

SEQ ID NO: 1888800 - DNA, 15 bp, Homo sapiens
agttgctggttcctt

SEQ ID NO: 1888801 - DNA, 15 bp, Homo sapiens
gttgctggttcctta

SEQ ID NO: 1888802 - DNA, 15 bp, Homo sapiens
ttgctggttccttat

SEQ ID NO: 1888803 - DNA, 15 bp, Homo sapiens
tgctggttccttatc

SEQ ID NO: 1888804 - DNA, 15 bp, Homo sapiens
gctggttccttatct

SEQ ID NO: 1888805 - DNA, 15 bp, Homo sapiens
ctggttccttatctg

SEQ ID NO: 1888806 - DNA, 15 bp, Homo sapiens
tggttccttatctgg

SEQ ID NO: 1888807 - DNA, 15 bp, Homo sapiens
ggttccttatctggc

SEQ ID NO: 1888808 - DNA, 15 bp, Homo sapiens
gttccttatctggcc

SEQ ID NO: 1888809 - DNA, 15 bp, Homo sapiens
ttccttatctggccc

SEQ ID NO: 1888810 - DNA, 15 bp, Homo sapiens
tccttatctggccct

SEQ ID NO: 1888811 - DNA, 15 bp, Homo sapiens
ccttatctggccctg

SEQ ID NO: 1888812 - DNA, 15 bp, Homo sapiens
cttatctggccctgg

SEQ ID NO: 1888813 - DNA, 15 bp, Homo sapiens
ttatctggccctggg

SEQ ID NO: 1888814 - DNA, 15 bp, Homo sapiens
tatctggccctgggc

SEQ ID NO: 1888815 - DNA, 15 bp, Homo sapiens
atctggccctgggcg

SEQ ID NO: 1888816 - DNA, 15 bp, Homo sapiens
tctggccctgggcga

SEQ ID NO: 1888817 - DNA, 15 bp, Homo sapiens
ctggccctgggcgag

SEQ ID NO: 1888818 - DNA, 15 bp, Homo sapiens
tggccctgggcgagg

SEQ ID NO: 1888819 - DNA, 15 bp, Homo sapiens
ggccctgggcgagga

SEQ ID NO: 1888820 - DNA, 15 bp, Homo sapiens
gccctgggcgaggaa

SEQ ID NO: 1888821 - DNA, 15 bp, Homo sapiens
ccctgggcgaggaag

SEQ ID NO: 1888822 - DNA, 15 bp, Homo sapiens
cctgggcgaggaagt

SEQ ID NO: 1888823 - DNA, 15 bp, Homo sapiens
ctgggcgaggaagtg

SEQ ID NO: 1888824 - DNA, 15 bp, Homo sapiens
tgggcgaggaagtgg

SEQ ID NO: 1888825 - DNA, 15 bp, Homo sapiens
gggcgaggaagtggg

SEQ ID NO: 1888826 - DNA, 15 bp, Homo sapiens
ggcgaggaagtgggt

SEQ ID NO: 1888827 - DNA, 15 bp, Homo sapiens
gcgaggaagtgggtg

SEQ ID NO: 1888828 - DNA, 15 bp, Homo sapiens
cgaggaagtgggtgc

SEQ ID NO: 1888829 - DNA, 15 bp, Homo sapiens
gaggaagtgggtgct

SEQ ID NO: 1888830 - DNA, 15 bp, Homo sapiens
aggaagtgggtgctt

SEQ ID NO: 1888831 - DNA, 15 bp, Homo sapiens
ggaagtgggtgcttt

SEQ ID NO: 1888832 - DNA, 15 bp, Homo sapiens
gaagtgggtgcttta

SEQ ID NO: 1888833 - DNA, 15 bp, Homo sapiens
aagtgggtgctttag

SEQ ID NO: 1888834 - DNA, 15 bp, Homo sapiens
agtgggtgctttaga

SEQ ID NO: 1888835 - DNA, 15 bp, Homo sapiens
gtgggtgctttagag

SEQ ID NO: 1888836 - DNA, 15 bp, Homo sapiens
tgggtgctttagagg

SEQ ID NO: 1888837 - DNA, 15 bp, Homo sapiens
gggtgctttagaggt

SEQ ID NO: 1888838 - DNA, 15 bp, Homo sapiens
ggtgctttagaggtc

SEQ ID NO: 1888839 - DNA, 15 bp, Homo sapiens
gtgctttagaggtct

SEQ ID NO: 1888840 - DNA, 15 bp, Homo sapiens
tgctttagaggtctt

SEQ ID NO: 1888841 - DNA, 15 bp, Homo sapiens
gctttagaggtctta

SEQ ID NO: 1888842 - DNA, 15 bp, Homo sapiens
ctttagaggtcttag

SEQ ID NO: 1888843 - DNA, 15 bp, Homo sapiens
tttagaggtcttaga

SEQ ID NO: 1888844 - DNA, 15 bp, Homo sapiens
ttagaggtcttagag

SEQ ID NO: 1888845 - DNA, 15 bp, Homo sapiens
tagaggtcttagagt

SEQ ID NO: 1888846 - DNA, 15 bp, Homo sapiens
agaggtcttagagta

SEQ ID NO: 1888847 - DNA, 15 bp, Homo sapiens
gaggtcttagagtac

SEQ ID NO: 1888848 - DNA, 15 bp, Homo sapiens
aggtcttagagtaca

SEQ ID NO: 1888849 - DNA, 15 bp, Homo sapiens
ggtcttagagtacag

SEQ ID NO: 1888850 - DNA, 15 bp, Homo sapiens
gtcttagagtacaga

SEQ ID NO: 1888851 - DNA, 15 bp, Homo sapiens
tcttagagtacagac

SEQ ID NO: 1888852 - DNA, 15 bp, Homo sapiens
cttagagtacagaca

SEQ ID NO: 1888853 - DNA, 15 bp, Homo sapiens
ttagagtacagacag

SEQ ID NO: 1888854 - DNA, 15 bp, Homo sapiens
tagagtacagacagc

SEQ ID NO: 1888855 - DNA, 15 bp, Homo sapiens
agagtacagacagct

SEQ ID NO: 1888856 - DNA, 15 bp, Homo sapiens
gagtacagacagctt

SEQ ID NO: 1888857 - DNA, 15 bp, Homo sapiens
agtacagacagcttt

SEQ ID NO: 1888858 - DNA, 15 bp, Homo sapiens
gtacagacagctttt

SEQ ID NO: 1888859 - DNA, 15 bp, Homo sapiens
tacagacagctttta

SEQ ID NO: 1888860 - DNA, 15 bp, Homo sapiens
acagacagcttttag

SEQ ID NO: 1888861 - DNA, 15 bp, Homo sapiens
cagacagcttttagg

SEQ ID NO: 1888862 - DNA, 15 bp, Homo sapiens
agacagcttttaggg

SEQ ID NO: 1888863 - DNA, 15 bp, Homo sapiens
gacagcttttagggc

SEQ ID NO: 1888864 - DNA, 15 bp, Homo sapiens
acagcttttagggca

SEQ ID NO: 1888865 - DNA, 15 bp, Homo sapiens
cagcttttagggcat

SEQ ID NO: 1888866 - DNA, 15 bp, Homo sapiens
agcttttagggcatt

SEQ ID NO: 1888867 - DNA, 15 bp, Homo sapiens
gcttttagggcattc

SEQ ID NO: 1888868 - DNA, 15 bp, Homo sapiens
cttttagggcattct

SEQ ID NO: 1888869 - DNA, 15 bp, Homo sapiens
ttttagggcattctg

SEQ ID NO: 1888870 - DNA, 15 bp, Homo sapiens
tttagggcattctga

SEQ ID NO: 1888871 - DNA, 15 bp, Homo sapiens
ttagggcattctgat

SEQ ID NO: 1888872 - DNA, 15 bp, Homo sapiens
tagggcattctgatc

SEQ ID NO: 1888873 - DNA, 15 bp, Homo sapiens
agggcattctgatct

SEQ ID NO: 1888874 - DNA, 15 bp, Homo sapiens
gggcattctgatctt

SEQ ID NO: 1888875 - DNA, 15 bp, Homo sapiens
ggcattctgatcttc

SEQ ID NO: 1888876 - DNA, 15 bp, Homo sapiens
gcattctgatcttca

SEQ ID NO: 1888877 - DNA, 15 bp, Homo sapiens
cattctgatcttcac

SEQ ID NO: 1888878 - DNA, 15 bp, Homo sapiens
attctgatcttcacc

SEQ ID NO: 1888879 - DNA, 15 bp, Homo sapiens
ttctgatcttcaccc

SEQ ID NO: 1888880 - DNA, 15 bp, Homo sapiens
tctgatcttcaccct

SEQ ID NO: 1888881 - DNA, 15 bp, Homo sapiens
ctgatcttcaccctg

SEQ ID NO: 1888882 - DNA, 15 bp, Homo sapiens
tgatcttcaccctgg

SEQ ID NO: 1888883 - DNA, 15 bp, Homo sapiens
gatcttcaccctggt

SEQ ID NO: 1888884 - DNA, 15 bp, Homo sapiens
atcttcaccctggtt

SEQ ID NO: 1888885 - DNA, 15 bp, Homo sapiens
tcttcaccctggttc

SEQ ID NO: 1888886 - DNA, 15 bp, Homo sapiens
cttcaccctggttca

SEQ ID NO: 1888887 - DNA, 15 bp, Homo sapiens
ttcaccctggttcag

SEQ ID NO: 1888888 - DNA, 15 bp, Homo sapiens
tcaccctggttcaga

SEQ ID NO: 1888889 - DNA, 15 bp, Homo sapiens
caccctggttcagat

SEQ ID NO: 1888890 - DNA, 15 bp, Homo sapiens
accctggttcagatg

SEQ ID NO: 1888891 - DNA, 15 bp, Homo sapiens
ccctggttcagatgt

SEQ ID NO: 1888892 - DNA, 15 bp, Homo sapiens
cctggttcagatgtc

SEQ ID NO: 1888893 - DNA, 15 bp, Homo sapiens
ctggttcagatgtct

SEQ ID NO: 1888894 - DNA, 15 bp, Homo sapiens
tggttcagatgtcta

SEQ ID NO: 1888895 - DNA, 15 bp, Homo sapiens
ggttcagatgtctaa

SEQ ID NO: 1888896 - DNA, 15 bp, Homo sapiens
gttcagatgtctaat

SEQ ID NO: 1888897 - DNA, 15 bp, Homo sapiens
ttcagatgtctaatc

SEQ ID NO: 1888898 - DNA, 15 bp, Homo sapiens
tcagatgtctaatcc

SEQ ID NO: 1888899 - DNA, 15 bp, Homo sapiens
cagatgtctaatcca

SEQ ID NO: 1888900 - DNA, 15 bp, Homo sapiens
agatgtctaatccat

SEQ ID NO: 1888901 - DNA, 15 bp, Homo sapiens
gatgtctaatccatg

SEQ ID NO: 1888902 - DNA, 15 bp, Homo sapiens
atgtctaatccatga

SEQ ID NO: 1888903 - DNA, 15 bp, Homo sapiens
tgtctaatccatgag

SEQ ID NO: 1888904 - DNA, 15 bp, Homo sapiens
gtctaatccatgaga

SEQ ID NO: 1888905 - DNA, 15 bp, Homo sapiens
tctaatccatgagat

SEQ ID NO: 1888906 - DNA, 15 bp, Homo sapiens
ctaatccatgagatg

SEQ ID NO: 1888907 - DNA, 15 bp, Homo sapiens
taatccatgagatgc

SEQ ID NO: 1888908 - DNA, 15 bp, Homo sapiens
aatccatgagatgct

SEQ ID NO: 1888909 - DNA, 15 bp, Homo sapiens
atccatgagatgctg

SEQ ID NO: 1888910 - DNA, 15 bp, Homo sapiens
tccatgagatgctgg

SEQ ID NO: 1888911 - DNA, 15 bp, Homo sapiens
ccatgagatgctgga

SEQ ID NO: 1888912 - DNA, 15 bp, Homo sapiens
catgagatgctggag

SEQ ID NO: 1888913 - DNA, 15 bp, Homo sapiens
atgagatgctggaga

SEQ ID NO: 1888914 - DNA, 15 bp, Homo sapiens
tgagatgctggagac

SEQ ID NO: 1888915 - DNA, 15 bp, Homo sapiens
gagatgctggagaca

SEQ ID NO: 1888916 - DNA, 15 bp, Homo sapiens
agatgctggagacag

SEQ ID NO: 1888917 - DNA, 15 bp, Homo sapiens
gatgctggagacagc

SEQ ID NO: 1888918 - DNA, 15 bp, Homo sapiens
atgctggagacagca

SEQ ID NO: 1888919 - DNA, 15 bp, Homo sapiens
tgctggagacagcac

SEQ ID NO: 1888920 - DNA, 15 bp, Homo sapiens
gctggagacagcact

SEQ ID NO: 1888921 - DNA, 15 bp, Homo sapiens
ctggagacagcactt

SEQ ID NO: 1888922 - DNA, 15 bp, Homo sapiens
tggagacagcactta

SEQ ID NO: 1888923 - DNA, 15 bp, Homo sapiens
ggagacagcacttag

SEQ ID NO: 1888924 - DNA, 15 bp, Homo sapiens
gagacagcacttaga

SEQ ID NO: 1888925 - DNA, 15 bp, Homo sapiens
agacagcacttagaa

SEQ ID NO: 1888926 - DNA, 15 bp, Homo sapiens
gacagcacttagaat

SEQ ID NO: 1888927 - DNA, 15 bp, Homo sapiens
acagcacttagaatc

SEQ ID NO: 1888928 - DNA, 15 bp, Homo sapiens
cagcacttagaatcc

SEQ ID NO: 1888929 - DNA, 15 bp, Homo sapiens
agcacttagaatccc

SEQ ID NO: 1888930 - DNA, 15 bp, Homo sapiens
gcacttagaatccca

SEQ ID NO: 1888931 - DNA, 15 bp, Homo sapiens
cacttagaatcccag

SEQ ID NO: 1888932 - DNA, 15 bp, Homo sapiens
acttagaatcccagc

SEQ ID NO: 1888933 - DNA, 15 bp, Homo sapiens
cttagaatcccagcc

SEQ ID NO: 1888934 - DNA, 15 bp, Homo sapiens
ttagaatcccagccc

SEQ ID NO: 1888935 - DNA, 15 bp, Homo sapiens
tagaatcccagcccc

SEQ ID NO: 1888936 - DNA, 15 bp, Homo sapiens
agaatcccagcccct

SEQ ID NO: 1888937 - DNA, 15 bp, Homo sapiens
gaatcccagcccctt

SEQ ID NO: 1888938 - DNA, 15 bp, Homo sapiens
aatcccagccccttc

SEQ ID NO: 1888939 - DNA, 15 bp, Homo sapiens
atcccagccccttca

SEQ ID NO: 1888940 - DNA, 15 bp, Homo sapiens
tcccagccccttcat

SEQ ID NO: 1888941 - DNA, 15 bp, Homo sapiens
cccagccccttcatc

SEQ ID NO: 1888942 - DNA, 15 bp, Homo sapiens
ccagccccttcatcc

SEQ ID NO: 1888943 - DNA, 15 bp, Homo sapiens
cagccccttcatccc

SEQ ID NO: 1888944 - DNA, 15 bp, Homo sapiens
agccccttcatccct

SEQ ID NO: 1888945 - DNA, 15 bp, Homo sapiens
gccccttcatccctc

SEQ ID NO: 1888946 - DNA, 15 bp, Homo sapiens
ccccttcatccctct

SEQ ID NO: 1888947 - DNA, 15 bp, Homo sapiens
cccttcatccctctc

SEQ ID NO: 1888948 - DNA, 15 bp, Homo sapiens
ccttcatccctctct

SEQ ID NO: 1888949 - DNA, 15 bp, Homo sapiens
cttcatccctctctg

SEQ ID NO: 1888950 - DNA, 15 bp, Homo sapiens
ttcatccctctctgt

SEQ ID NO: 1888951 - DNA, 15 bp, Homo sapiens
tcatccctctctgta

SEQ ID NO: 1888952 - DNA, 15 bp, Homo sapiens
catccctctctgtag

SEQ ID NO: 1888953 - DNA, 15 bp, Homo sapiens
atccctctctgtaga

SEQ ID NO: 1888954 - DNA, 15 bp, Homo sapiens
tccctctctgtagag

SEQ ID NO: 1888955 - DNA, 15 bp, Homo sapiens
ccctctctgtagagc

SEQ ID NO: 1888956 - DNA, 15 bp, Homo sapiens
cctctctgtagagcc

SEQ ID NO: 1888957 - DNA, 15 bp, Homo sapiens
ctctctgtagagcca

SEQ ID NO: 1888958 - DNA, 15 bp, Homo sapiens
tctctgtagagccac

SEQ ID NO: 1888959 - DNA, 15 bp, Homo sapiens
ctctgtagagccaca

SEQ ID NO: 1888960 - DNA, 15 bp, Homo sapiens
tctgtagagccacac

SEQ ID NO: 1888961 - DNA, 15 bp, Homo sapiens
ctgtagagccacacc

SEQ ID NO: 1888962 - DNA, 15 bp, Homo sapiens
tgtagagccacaccc

SEQ ID NO: 1888963 - DNA, 15 bp, Homo sapiens
gtagagccacaccca

SEQ ID NO: 1888964 - DNA, 15 bp, Homo sapiens
tagagccacacccaa

SEQ ID NO: 1888965 - DNA, 15 bp, Homo sapiens
agagccacacccaaa

SEQ ID NO: 1888966 - DNA, 15 bp, Homo sapiens
gagccacacccaaag

SEQ ID NO: 1888967 - DNA, 15 bp, Homo sapiens
agccacacccaaagc

SEQ ID NO: 1888968 - DNA, 15 bp, Homo sapiens
gccacacccaaagca

SEQ ID NO: 1888969 - DNA, 15 bp, Homo sapiens
ccacacccaaagcag

SEQ ID NO: 1888970 - DNA, 15 bp, Homo sapiens
cacacccaaagcagc

SEQ ID NO: 1888971 - DNA, 15 bp, Homo sapiens
acacccaaagcagca

SEQ ID NO: 1888972 - DNA, 15 bp, Homo sapiens
cacccaaagcagcag

SEQ ID NO: 1888973 - DNA, 15 bp, Homo sapiens
acccaaagcagcagg

SEQ ID NO: 1888974 - DNA, 15 bp, Homo sapiens
cccaaagcagcagga

SEQ ID NO: 1888975 - DNA, 15 bp, Homo sapiens
ccaaagcagcaggat

SEQ ID NO: 1888976 - DNA, 15 bp, Homo sapiens
caaagcagcaggatt

SEQ ID NO: 1888977 - DNA, 15 bp, Homo sapiens
aaagcagcaggatta

SEQ ID NO: 1888978 - DNA, 15 bp, Homo sapiens
aagcagcaggattat

SEQ ID NO: 1888979 - DNA, 15 bp, Homo sapiens
agcagcaggattata

SEQ ID NO: 1888980 - DNA, 15 bp, Homo sapiens
gcagcaggattatat

SEQ ID NO: 1888981 - DNA, 15 bp, Homo sapiens
cagcaggattatatg

SEQ ID NO: 1888982 - DNA, 15 bp, Homo sapiens
agcaggattatatgt

SEQ ID NO: 1888983 - DNA, 15 bp, Homo sapiens
gcaggattatatgtc

SEQ ID NO: 1888984 - DNA, 15 bp, Homo sapiens
caggattatatgtcc

SEQ ID NO: 1888985 - DNA, 15 bp, Homo sapiens
aggattatatgtcct

SEQ ID NO: 1888986 - DNA, 15 bp, Homo sapiens
ggattatatgtcctt

SEQ ID NO: 1888987 - DNA, 15 bp, Homo sapiens
gattatatgtccttt

SEQ ID NO: 1888988 - DNA, 15 bp, Homo sapiens
attatatgtcctttt

SEQ ID NO: 1888989 - DNA, 15 bp, Homo sapiens
ttatatgtccttttt

SEQ ID NO: 1888990 - DNA, 15 bp, Homo sapiens
tatatgtccttttta

SEQ ID NO: 1888991 - DNA, 15 bp, Homo sapiens
atatgtcctttttac

SEQ ID NO: 1888992 - DNA, 15 bp, Homo sapiens
tatgtcctttttact

SEQ ID NO: 1888993 - DNA, 15 bp, Homo sapiens
atgtcctttttacta

SEQ ID NO: 1888994 - DNA, 15 bp, Homo sapiens
tgtcctttttactaa

SEQ ID NO: 1888995 - DNA, 15 bp, Homo sapiens
gtcctttttactaat

SEQ ID NO: 1888996 - DNA, 15 bp, Homo sapiens
tcctttttactaatt

SEQ ID NO: 1888997 - DNA, 15 bp, Homo sapiens
cctttttactaattg

SEQ ID NO: 1888998 - DNA, 15 bp, Homo sapiens
ctttttactaattgg

SEQ ID NO: 1888999 - DNA, 15 bp, Homo sapiens
tttttactaattgga

SEQ ID NO: 1889000 - DNA, 15 bp, Homo sapiens
ttttactaattggaa

SEQ ID NO: 1889001 - DNA, 15 bp, Homo sapiens
tttactaattggaat

SEQ ID NO: 1889002 - DNA, 15 bp, Homo sapiens
ttactaattggaatg

SEQ ID NO: 1889003 - DNA, 15 bp, Homo sapiens
tactaattggaatgc

SEQ ID NO: 1889004 - DNA, 15 bp, Homo sapiens
actaattggaatgct

SEQ ID NO: 1889005 - DNA, 15 bp, Homo sapiens
ctaattggaatgctc

SEQ ID NO: 1889006 - DNA, 15 bp, Homo sapiens
taattggaatgctct

SEQ ID NO: 1889007 - DNA, 15 bp, Homo sapiens
aattggaatgctctg

SEQ ID NO: 1889008 - DNA, 15 bp, Homo sapiens
attggaatgctctgg

SEQ ID NO: 1889009 - DNA, 15 bp, Homo sapiens
ttggaatgctctggt

SEQ ID NO: 1889010 - DNA, 15 bp, Homo sapiens
tggaatgctctggtt

SEQ ID NO: 1889011 - DNA, 15 bp, Homo sapiens
ggaatgctctggttg

SEQ ID NO: 1889012 - DNA, 15 bp, Homo sapiens
gaatgctctggttgg

SEQ ID NO: 1889013 - DNA, 15 bp, Homo sapiens
aatgctctggttggg

SEQ ID NO: 1889014 - DNA, 15 bp, Homo sapiens
atgctctggttgggt

SEQ ID NO: 1889015 - DNA, 15 bp, Homo sapiens
tgctctggttgggta

SEQ ID NO: 1889016 - DNA, 15 bp, Homo sapiens
gctctggttgggtag

SEQ ID NO: 1889017 - DNA, 15 bp, Homo sapiens
ctctggttgggtagc

SEQ ID NO: 1889018 - DNA, 15 bp, Homo sapiens
tctggttgggtagcc

SEQ ID NO: 1889019 - DNA, 15 bp, Homo sapiens
ctggttgggtagccg

SEQ ID NO: 1889020 - DNA, 15 bp, Homo sapiens
tggttgggtagccgt

SEQ ID NO: 1889021 - DNA, 15 bp, Homo sapiens
ggttgggtagccgtt

SEQ ID NO: 1889022 - DNA, 15 bp, Homo sapiens
gttgggtagccgttt

SEQ ID NO: 1889023 - DNA, 15 bp, Homo sapiens
ttgggtagccgtttt

SEQ ID NO: 1889024 - DNA, 15 bp, Homo sapiens
tgggtagccgttttt

SEQ ID NO: 1889025 - DNA, 15 bp, Homo sapiens
gggtagccgtttttt

SEQ ID NO: 1889026 - DNA, 15 bp, Homo sapiens
ggtagccgttttttg

SEQ ID NO: 1889027 - DNA, 15 bp, Homo sapiens
gtagccgttttttgg

SEQ ID NO: 1889028 - DNA, 15 bp, Homo sapiens
tagccgttttttgga

SEQ ID NO: 1889029 - DNA, 15 bp, Homo sapiens
agccgttttttggat

SEQ ID NO: 1889030 - DNA, 15 bp, Homo sapiens
gccgttttttggatt

SEQ ID NO: 1889031 - DNA, 15 bp, Homo sapiens
ccgttttttggattg

SEQ ID NO: 1889032 - DNA, 15 bp, Homo sapiens
cgttttttggattgt

SEQ ID NO: 1889033 - DNA, 15 bp, Homo sapiens
gttttttggattgtt

SEQ ID NO: 1889034 - DNA, 15 bp, Homo sapiens
ttttttggattgttt

SEQ ID NO: 1889035 - DNA, 15 bp, Homo sapiens
tttttggattgtttt

SEQ ID NO: 1889036 - DNA, 15 bp, Homo sapiens
ttttggattgttttt

SEQ ID NO: 1889037 - DNA, 15 bp, Homo sapiens
tttggattgtttttg

SEQ ID NO: 1889038 - DNA, 15 bp, Homo sapiens
ttggattgtttttgg

SEQ ID NO: 1889039 - DNA, 15 bp, Homo sapiens
tggattgtttttggg

SEQ ID NO: 1889040 - DNA, 15 bp, Homo sapiens
ggattgtttttgggt

SEQ ID NO: 1889041 - DNA, 15 bp, Homo sapiens
gattgtttttgggta

SEQ ID NO: 1889042 - DNA, 15 bp, Homo sapiens
attgtttttgggtac

SEQ ID NO: 1889043 - DNA, 15 bp, Homo sapiens
ttgtttttgggtaca

SEQ ID NO: 1889044 - DNA, 15 bp, Homo sapiens
tgtttttgggtacag

SEQ ID NO: 1889045 - DNA, 15 bp, Homo sapiens
gtttttgggtacagc

SEQ ID NO: 1889046 - DNA, 15 bp, Homo sapiens
tttttgggtacagca

SEQ ID NO: 1889047 - DNA, 15 bp, Homo sapiens
ttttgggtacagcaa

SEQ ID NO: 1889048 - DNA, 15 bp, Homo sapiens
tttgggtacagcaat

SEQ ID NO: 1889049 - DNA, 15 bp, Homo sapiens
ttgggtacagcaatc

SEQ ID NO: 1889050 - DNA, 15 bp, Homo sapiens
tgggtacagcaatcc

SEQ ID NO: 1889051 - DNA, 15 bp, Homo sapiens
gggtacagcaatcct

SEQ ID NO: 1889052 - DNA, 15 bp, Homo sapiens
ggtacagcaatcctt

SEQ ID NO: 1889053 - DNA, 15 bp, Homo sapiens
gtacagcaatccttc

SEQ ID NO: 1889054 - DNA, 15 bp, Homo sapiens
tacagcaatccttct

SEQ ID NO: 1889055 - DNA, 15 bp, Homo sapiens
acagcaatccttctt

SEQ ID NO: 1889056 - DNA, 15 bp, Homo sapiens
cagcaatccttcttt

SEQ ID NO: 1889057 - DNA, 15 bp, Homo sapiens
agcaatccttcttta

SEQ ID NO: 1889058 - DNA, 15 bp, Homo sapiens
gcaatccttctttat

SEQ ID NO: 1889059 - DNA, 15 bp, Homo sapiens
caatccttctttatt

SEQ ID NO: 1889060 - DNA, 15 bp, Homo sapiens
aatccttctttatta

SEQ ID NO: 1889061 - DNA, 15 bp, Homo sapiens
atccttctttattac

SEQ ID NO: 1889062 - DNA, 15 bp, Homo sapiens
tccttctttattaca

SEQ ID NO: 1889063 - DNA, 15 bp, Homo sapiens
ccttctttattacat

SEQ ID NO: 1889064 - DNA, 15 bp, Homo sapiens
cttctttattacatt

SEQ ID NO: 1889065 - DNA, 15 bp, Homo sapiens
ttctttattacattt

SEQ ID NO: 1889066 - DNA, 15 bp, Homo sapiens
tctttattacatttg

SEQ ID NO: 1889067 - DNA, 15 bp, Homo sapiens
ctttattacatttgc

SEQ ID NO: 1889068 - DNA, 15 bp, Homo sapiens
tttattacatttgct

SEQ ID NO: 1889069 - DNA, 15 bp, Homo sapiens
ttattacatttgcta

SEQ ID NO: 1889070 - DNA, 15 bp, Homo sapiens
tattacatttgctag

SEQ ID NO: 1889071 - DNA, 15 bp, Homo sapiens
attacatttgctagg

SEQ ID NO: 1889072 - DNA, 15 bp, Homo sapiens
ttacatttgctaggt

SEQ ID NO: 1889073 - DNA, 15 bp, Homo sapiens
tacatttgctaggtg

SEQ ID NO: 1889074 - DNA, 15 bp, Homo sapiens
acatttgctaggtgg

SEQ ID NO: 1889075 - DNA, 15 bp, Homo sapiens
catttgctaggtggc

SEQ ID NO: 1889076 - DNA, 15 bp, Homo sapiens
atttgctaggtggct

SEQ ID NO: 1889077 - DNA, 15 bp, Homo sapiens
tttgctaggtggctg

SEQ ID NO: 1889078 - DNA, 15 bp, Homo sapiens
ttgctaggtggctga

SEQ ID NO: 1889079 - DNA, 15 bp, Homo sapiens
tgctaggtggctgaa

SEQ ID NO: 1889080 - DNA, 15 bp, Homo sapiens
gctaggtggctgaat

SEQ ID NO: 1889081 - DNA, 15 bp, Homo sapiens
ctaggtggctgaatt

SEQ ID NO: 1889082 - DNA, 15 bp, Homo sapiens
taggtggctgaattt

SEQ ID NO: 1889083 - DNA, 15 bp, Homo sapiens
aggtggctgaatttt

SEQ ID NO: 1889084 - DNA, 15 bp, Homo sapiens
ggtggctgaattttt

SEQ ID NO: 1889085 - DNA, 15 bp, Homo sapiens
gtggctgaatttttt

SEQ ID NO: 1889086 - DNA, 15 bp, Homo sapiens
tggctgaatttttta

SEQ ID NO: 1889087 - DNA, 15 bp, Homo sapiens
ggctgaattttttaa

SEQ ID NO: 1889088 - DNA, 15 bp, Homo sapiens
gctgaattttttaag

SEQ ID NO: 1889089 - DNA, 15 bp, Homo sapiens
ctgaattttttaagt

SEQ ID NO: 1889090 - DNA, 15 bp, Homo sapiens
tgaattttttaagta

SEQ ID NO: 1889091 - DNA, 15 bp, Homo sapiens
gaattttttaagtag

SEQ ID NO: 1889092 - DNA, 15 bp, Homo sapiens
aattttttaagtagt

SEQ ID NO: 1889093 - DNA, 15 bp, Homo sapiens
attttttaagtagta

SEQ ID NO: 1889094 - DNA, 15 bp, Homo sapiens
ttttttaagtagtat

SEQ ID NO: 1889095 - DNA, 15 bp, Homo sapiens
tttttaagtagtatg

SEQ ID NO: 1889096 - DNA, 15 bp, Homo sapiens
ttttaagtagtatgc

SEQ ID NO: 1889097 - DNA, 15 bp, Homo sapiens
tttaagtagtatgct

SEQ ID NO: 1889098 - DNA, 15 bp, Homo sapiens
ttaagtagtatgctg

SEQ ID NO: 1889099 - DNA, 15 bp, Homo sapiens
taagtagtatgctgg

SEQ ID NO: 1889100 - DNA, 15 bp, Homo sapiens
aagtagtatgctggg

SEQ ID NO: 1889101 - DNA, 15 bp, Homo sapiens
agtagtatgctggga

SEQ ID NO: 1889102 - DNA, 15 bp, Homo sapiens
gtagtatgctgggaa

SEQ ID NO: 1889103 - DNA, 15 bp, Homo sapiens
tagtatgctgggaac

SEQ ID NO: 1889104 - DNA, 15 bp, Homo sapiens
agtatgctgggaaca

SEQ ID NO: 1889105 - DNA, 15 bp, Homo sapiens
gtatgctgggaacac

SEQ ID NO: 1889106 - DNA, 15 bp, Homo sapiens
tatgctgggaacaca

SEQ ID NO: 1889107 - DNA, 15 bp, Homo sapiens
atgctgggaacacaa

SEQ ID NO: 1889108 - DNA, 15 bp, Homo sapiens
tgctgggaacacaat

SEQ ID NO: 1889109 - DNA, 15 bp, Homo sapiens
gctgggaacacaatg

SEQ ID NO: 1889110 - DNA, 15 bp, Homo sapiens
ctgggaacacaatgg

SEQ ID NO: 1889111 - DNA, 15 bp, Homo sapiens
tgggaacacaatggg

SEQ ID NO: 1889112 - DNA, 15 bp, Homo sapiens
gggaacacaatggga

SEQ ID NO: 1889113 - DNA, 15 bp, Homo sapiens
ggaacacaatgggat

SEQ ID NO: 1889114 - DNA, 15 bp, Homo sapiens
gaacacaatgggatt

SEQ ID NO: 1889115 - DNA, 15 bp, Homo sapiens
aacacaatgggatta

SEQ ID NO: 1889116 - DNA, 15 bp, Homo sapiens
acacaatgggattag

SEQ ID NO: 1889117 - DNA, 15 bp, Homo sapiens
cacaatgggattagt

SEQ ID NO: 1889118 - DNA, 15 bp, Homo sapiens
acaatgggattagtt

SEQ ID NO: 1889119 - DNA, 15 bp, Homo sapiens
caatgggattagttc

SEQ ID NO: 1889120 - DNA, 15 bp, Homo sapiens
aatgggattagttct

SEQ ID NO: 1889121 - DNA, 15 bp, Homo sapiens
atgggattagttctg

SEQ ID NO: 1889122 - DNA, 15 bp, Homo sapiens
tgggattagttctgc

SEQ ID NO: 1889123 - DNA, 15 bp, Homo sapiens
gggattagttctgct

SEQ ID NO: 1889124 - DNA, 15 bp, Homo sapiens
ggattagttctgctt

SEQ ID NO: 1889125 - DNA, 15 bp, Homo sapiens
gattagttctgcttt

SEQ ID NO: 1889126 - DNA, 15 bp, Homo sapiens
attagttctgctttt

SEQ ID NO: 1889127 - DNA, 15 bp, Homo sapiens
ttagttctgcttttc

SEQ ID NO: 1889128 - DNA, 15 bp, Homo sapiens
tagttctgcttttct

SEQ ID NO: 1889129 - DNA, 15 bp, Homo sapiens
agttctgcttttctg

SEQ ID NO: 1889130 - DNA, 15 bp, Homo sapiens
gttctgcttttctga

SEQ ID NO: 1889131 - DNA, 15 bp, Homo sapiens
ttctgcttttctgac

SEQ ID NO: 1889132 - DNA, 15 bp, Homo sapiens
tctgcttttctgacc

SEQ ID NO: 1889133 - DNA, 15 bp, Homo sapiens
ctgcttttctgacct

SEQ ID NO: 1889134 - DNA, 15 bp, Homo sapiens
tgcttttctgacctt

SEQ ID NO: 1889135 - DNA, 15 bp, Homo sapiens
gcttttctgaccttt

SEQ ID NO: 1889136 - DNA, 15 bp, Homo sapiens
cttttctgacctttt

SEQ ID NO: 1889137 - DNA, 15 bp, Homo sapiens
tttctgaccttttca

SEQ ID NO: 1889138 - DNA, 15 bp, Homo sapiens
ttctgaccttttcaa

SEQ ID NO: 1889139 - DNA, 15 bp, Homo sapiens
tctgaccttttcaaa

SEQ ID NO: 1889140 - DNA, 15 bp, Homo sapiens
ctgaccttttcaaaa

SEQ ID NO: 1889141 - DNA, 15 bp, Homo sapiens
tgaccttttcaaaaa

SEQ ID NO: 1889142 - DNA, 15 bp, Homo sapiens
gaccttttcaaaaag

SEQ ID NO: 1889143 - DNA, 15 bp, Homo sapiens
accttttcaaaaaga

SEQ ID NO: 1889144 - DNA, 15 bp, Homo sapiens
ccttttcaaaaagat

SEQ ID NO: 1889145 - DNA, 15 bp, Homo sapiens
cttttcaaaaagatt

SEQ ID NO: 1889146 - DNA, 15 bp, Homo sapiens
ttttcaaaaagattt

SEQ ID NO: 1889147 - DNA, 15 bp, Homo sapiens
tttcaaaaagattta

SEQ ID NO: 1889148 - DNA, 15 bp, Homo sapiens
ttcaaaaagatttag

SEQ ID NO: 1889149 - DNA, 15 bp, Homo sapiens
tcaaaaagatttaga

SEQ ID NO: 1889150 - DNA, 15 bp, Homo sapiens
caaaaagatttagaa

SEQ ID NO: 1889151 - DNA, 15 bp, Homo sapiens
aaaaagatttagaaa

SEQ ID NO: 1889152 - DNA, 15 bp, Homo sapiens
aaaagatttagaaaa

SEQ ID NO: 1889153 - DNA, 15 bp, Homo sapiens
aaagatttagaaaaa

SEQ ID NO: 1889154 - DNA, 15 bp, Homo sapiens
aagatttagaaaaat

SEQ ID NO: 1889155 - DNA, 15 bp, Homo sapiens
agatttagaaaaatg

SEQ ID NO: 1889156 - DNA, 15 bp, Homo sapiens
gatttagaaaaatgg

SEQ ID NO: 1889157 - DNA, 15 bp, Homo sapiens
atttagaaaaatggc

SEQ ID NO: 1889158 - DNA, 15 bp, Homo sapiens
tttagaaaaatggca

SEQ ID NO: 1889159 - DNA, 15 bp, Homo sapiens
ttagaaaaatggcaa

SEQ ID NO: 1889160 - DNA, 15 bp, Homo sapiens
tagaaaaatggcaag

SEQ ID NO: 1889161 - DNA, 15 bp, Homo sapiens
agaaaaatggcaagg

SEQ ID NO: 1889162 - DNA, 15 bp, Homo sapiens
gaaaaatggcaaggc

SEQ ID NO: 1889163 - DNA, 15 bp, Homo sapiens
aaaaatggcaaggca

SEQ ID NO: 1889164 - DNA, 15 bp, Homo sapiens
aaaatggcaaggcac

SEQ ID NO: 1889165 - DNA, 15 bp, Homo sapiens
aaatggcaaggcact

SEQ ID NO: 1889166 - DNA, 15 bp, Homo sapiens
aatggcaaggcactg

SEQ ID NO: 1889167 - DNA, 15 bp, Homo sapiens
atggcaaggcactgg

SEQ ID NO: 1889168 - DNA, 15 bp, Homo sapiens
tggcaaggcactggg

SEQ ID NO: 1889169 - DNA, 15 bp, Homo sapiens
ggcaaggcactgggg

SEQ ID NO: 1889170 - DNA, 15 bp, Homo sapiens
gcaaggcactggggg

SEQ ID NO: 1889171 - DNA, 15 bp, Homo sapiens
caaggcactgggggc

SEQ ID NO: 1889172 - DNA, 15 bp, Homo sapiens
aaggcactgggggcc

SEQ ID NO: 1889173 - DNA, 15 bp, Homo sapiens
aggcactgggggcca

SEQ ID NO: 1889174 - DNA, 15 bp, Homo sapiens
ggcactgggggccag

SEQ ID NO: 1889175 - DNA, 15 bp, Homo sapiens
gcactgggggccagg

SEQ ID NO: 1889176 - DNA, 15 bp, Homo sapiens
cactgggggccaggg

SEQ ID NO: 1889177 - DNA, 15 bp, Homo sapiens
actgggggccaggga

SEQ ID NO: 1889178 - DNA, 15 bp, Homo sapiens
ctgggggccagggat

SEQ ID NO: 1889179 - DNA, 15 bp, Homo sapiens
tgggggccagggatg

SEQ ID NO: 1889180 - DNA, 15 bp, Homo sapiens
gggggccagggatgg

SEQ ID NO: 1889181 - DNA, 15 bp, Homo sapiens
ggggccagggatggg

SEQ ID NO: 1889182 - DNA, 15 bp, Homo sapiens
gggccagggatgggg

SEQ ID NO: 1889183 - DNA, 15 bp, Homo sapiens
ggccagggatggggg

SEQ ID NO: 1889184 - DNA, 15 bp, Homo sapiens
gccagggatgggggt

SEQ ID NO: 1889185 - DNA, 15 bp, Homo sapiens
ccagggatgggggtg

SEQ ID NO: 1889186 - DNA, 15 bp, Homo sapiens
cagggatgggggtgt

SEQ ID NO: 1889187 - DNA, 15 bp, Homo sapiens
agggatgggggtgtc

SEQ ID NO: 1889188 - DNA, 15 bp, Homo sapiens
gggatgggggtgtcg

SEQ ID NO: 1889189 - DNA, 15 bp, Homo sapiens
ggatgggggtgtcga

SEQ ID NO: 1889190 - DNA, 15 bp, Homo sapiens
gatgggggtgtcgaa

SEQ ID NO: 1889191 - DNA, 15 bp, Homo sapiens
atgggggtgtcgaag

SEQ ID NO: 1889192 - DNA, 15 bp, Homo sapiens
tgggggtgtcgaaga

SEQ ID NO: 1889193 - DNA, 15 bp, Homo sapiens
gggggtgtcgaagaa

SEQ ID NO: 1889194 - DNA, 15 bp, Homo sapiens
ggggtgtcgaagaac

SEQ ID NO: 1889195 - DNA, 15 bp, Homo sapiens
gggtgtcgaagaaca

SEQ ID NO: 1889196 - DNA, 15 bp, Homo sapiens
ggtgtcgaagaacat

SEQ ID NO: 1889197 - DNA, 15 bp, Homo sapiens
gtgtcgaagaacata

SEQ ID NO: 1889198 - DNA, 15 bp, Homo sapiens
tgtcgaagaacatat

SEQ ID NO: 1889199 - DNA, 15 bp, Homo sapiens
gtcgaagaacatatt

SEQ ID NO: 1889200 - DNA, 15 bp, Homo sapiens
tcgaagaacatattt

SEQ ID NO: 1889201 - DNA, 15 bp, Homo sapiens
cgaagaacatatttt

SEQ ID NO: 1889202 - DNA, 15 bp, Homo sapiens
gaagaacatattttg

SEQ ID NO: 1889203 - DNA, 15 bp, Homo sapiens
aagaacatattttgg

SEQ ID NO: 1889204 - DNA, 15 bp, Homo sapiens
agaacatattttggg

SEQ ID NO: 1889205 - DNA, 15 bp, Homo sapiens
gaacatattttgggg

SEQ ID NO: 1889206 - DNA, 15 bp, Homo sapiens
aacatattttggggg

SEQ ID NO: 1889207 - DNA, 15 bp, Homo sapiens
acatattttggggga

SEQ ID NO: 1889208 - DNA, 15 bp, Homo sapiens
catattttgggggaa

SEQ ID NO: 1889209 - DNA, 15 bp, Homo sapiens
atattttgggggaaa

SEQ ID NO: 1889210 - DNA, 15 bp, Homo sapiens
tattttgggggaaag

SEQ ID NO: 1889211 - DNA, 15 bp, Homo sapiens
attttgggggaaaga

SEQ ID NO: 1889212 - DNA, 15 bp, Homo sapiens
ttttgggggaaagaa

SEQ ID NO: 1889213 - DNA, 15 bp, Homo sapiens
tttgggggaaagaag

SEQ ID NO: 1889214 - DNA, 15 bp, Homo sapiens
ttgggggaaagaagg

SEQ ID NO: 1889215 - DNA, 15 bp, Homo sapiens
tgggggaaagaaggg

SEQ ID NO: 1889216 - DNA, 15 bp, Homo sapiens
gggggaaagaaggga

SEQ ID NO: 1889217 - DNA, 15 bp, Homo sapiens
ggggaaagaagggag

SEQ ID NO: 1889218 - DNA, 15 bp, Homo sapiens
gggaaagaagggagg

SEQ ID NO: 1889219 - DNA, 15 bp, Homo sapiens
ggaaagaagggaggc

SEQ ID NO: 1889220 - DNA, 15 bp, Homo sapiens
gaaagaagggaggca

SEQ ID NO: 1889221 - DNA, 15 bp, Homo sapiens
aaagaagggaggcaa

SEQ ID NO: 1889222 - DNA, 15 bp, Homo sapiens
aagaagggaggcaaa

SEQ ID NO: 1889223 - DNA, 15 bp, Homo sapiens
agaagggaggcaaaa

SEQ ID NO: 1889224 - DNA, 15 bp, Homo sapiens
gaagggaggcaaaat

SEQ ID NO: 1889225 - DNA, 15 bp, Homo sapiens
aagggaggcaaaatg

SEQ ID NO: 1889226 - DNA, 15 bp, Homo sapiens
agggaggcaaaatgt

SEQ ID NO: 1889227 - DNA, 15 bp, Homo sapiens
gggaggcaaaatgta

SEQ ID NO: 1889228 - DNA, 15 bp, Homo sapiens
ggaggcaaaatgtat

SEQ ID NO: 1889229 - DNA, 15 bp, Homo sapiens
gaggcaaaatgtatt

SEQ ID NO: 1889230 - DNA, 15 bp, Homo sapiens
aggcaaaatgtattc

SEQ ID NO: 1889231 - DNA, 15 bp, Homo sapiens
ggcaaaatgtattcc

SEQ ID NO: 1889232 - DNA, 15 bp, Homo sapiens
gcaaaatgtattccc

SEQ ID NO: 1889233 - DNA, 15 bp, Homo sapiens
caaaatgtattcccc

SEQ ID NO: 1889234 - DNA, 15 bp, Homo sapiens
aaaatgtattcccct

SEQ ID NO: 1889235 - DNA, 15 bp, Homo sapiens
aaatgtattcccctt

SEQ ID NO: 1889236 - DNA, 15 bp, Homo sapiens
aatgtattccccttg

SEQ ID NO: 1889237 - DNA, 15 bp, Homo sapiens
atgtattccccttgt

SEQ ID NO: 1889238 - DNA, 15 bp, Homo sapiens
tgtattccccttgtc

SEQ ID NO: 1889239 - DNA, 15 bp, Homo sapiens
gtattccccttgtct

SEQ ID NO: 1889240 - DNA, 15 bp, Homo sapiens
tattccccttgtctc

SEQ ID NO: 1889241 - DNA, 15 bp, Homo sapiens
attccccttgtctca

SEQ ID NO: 1889242 - DNA, 15 bp, Homo sapiens
ttccccttgtctcat

SEQ ID NO: 1889243 - DNA, 15 bp, Homo sapiens
tccccttgtctcatt

SEQ ID NO: 1889244 - DNA, 15 bp, Homo sapiens
ccccttgtctcattg

SEQ ID NO: 1889245 - DNA, 15 bp, Homo sapiens
cccttgtctcattgt

SEQ ID NO: 1889246 - DNA, 15 bp, Homo sapiens
ccttgtctcattgtt

SEQ ID NO: 1889247 - DNA, 15 bp, Homo sapiens
cttgtctcattgttc

SEQ ID NO: 1889248 - DNA, 15 bp, Homo sapiens
ttgtctcattgttct

SEQ ID NO: 1889249 - DNA, 15 bp, Homo sapiens
tgtctcattgttctt

SEQ ID NO: 1889250 - DNA, 15 bp, Homo sapiens
gtctcattgttcttc

SEQ ID NO: 1889251 - DNA, 15 bp, Homo sapiens
tctcattgttcttca

SEQ ID NO: 1889252 - DNA, 15 bp, Homo sapiens
ctcattgttcttcac

SEQ ID NO: 1889253 - DNA, 15 bp, Homo sapiens
tcattgttcttcacc

SEQ ID NO: 1889254 - DNA, 15 bp, Homo sapiens
cattgttcttcacca

SEQ ID NO: 1889255 - DNA, 15 bp, Homo sapiens
attgttcttcaccac

SEQ ID NO: 1889256 - DNA, 15 bp, Homo sapiens
ttgttcttcaccacc

SEQ ID NO: 1889257 - DNA, 15 bp, Homo sapiens
tgttcttcaccacct

SEQ ID NO: 1889258 - DNA, 15 bp, Homo sapiens
gttcttcaccacctt

SEQ ID NO: 1889259 - DNA, 15 bp, Homo sapiens
ttcttcaccacctta

SEQ ID NO: 1889260 - DNA, 15 bp, Homo sapiens
tcttcaccaccttaa

SEQ ID NO: 1889261 - DNA, 15 bp, Homo sapiens
cttcaccaccttaaa

SEQ ID NO: 1889262 - DNA, 15 bp, Homo sapiens
ttcaccaccttaaaa

SEQ ID NO: 1889263 - DNA, 15 bp, Homo sapiens
tcaccaccttaaaaa

SEQ ID NO: 1889264 - DNA, 15 bp, Homo sapiens
caccaccttaaaaaa

SEQ ID NO: 1889265 - DNA, 15 bp, Homo sapiens
accaccttaaaaaaa

SEQ ID NO: 1889266 - DNA, 15 bp, Homo sapiens
ccaccttaaaaaaag

SEQ ID NO: 1889267 - DNA, 15 bp, Homo sapiens
caccttaaaaaaagt

SEQ ID NO: 1889268 - DNA, 15 bp, Homo sapiens
accttaaaaaaagtt

SEQ ID NO: 1889269 - DNA, 15 bp, Homo sapiens
ccttaaaaaaagttt

SEQ ID NO: 1889270 - DNA, 15 bp, Homo sapiens
cttaaaaaaagtttg

SEQ ID NO: 1889271 - DNA, 15 bp, Homo sapiens
ttaaaaaaagtttgg

SEQ ID NO: 1889272 - DNA, 15 bp, Homo sapiens
taaaaaaagtttggc

SEQ ID NO: 1889273 - DNA, 15 bp, Homo sapiens
aaaaaaagtttggct

SEQ ID NO: 1889274 - DNA, 15 bp, Homo sapiens
aaaaaagtttggctt

SEQ ID NO: 1889275 - DNA, 15 bp, Homo sapiens
aaaaagtttggcttt

SEQ ID NO: 1889276 - DNA, 15 bp, Homo sapiens
aaaagtttggctttg

SEQ ID NO: 1889277 - DNA, 15 bp, Homo sapiens
aaagtttggctttga

SEQ ID NO: 1889278 - DNA, 15 bp, Homo sapiens
aagtttggctttgag

SEQ ID NO: 1889279 - DNA, 15 bp, Homo sapiens
agtttggctttgagt

SEQ ID NO: 1889280 - DNA, 15 bp, Homo sapiens
gtttggctttgagtt

SEQ ID NO: 1889281 - DNA, 15 bp, Homo sapiens
tttggctttgagttt

SEQ ID NO: 1889282 - DNA, 15 bp, Homo sapiens
tggctttgagtttat

SEQ ID NO: 1889283 - DNA, 15 bp, Homo sapiens
ggctttgagtttata

SEQ ID NO: 1889284 - DNA, 15 bp, Homo sapiens
gctttgagtttataa

SEQ ID NO: 1889285 - DNA, 15 bp, Homo sapiens
ctttgagtttataaa

SEQ ID NO: 1889286 - DNA, 15 bp, Homo sapiens
tttgagtttataaat

SEQ ID NO: 1889287 - DNA, 15 bp, Homo sapiens
ttgagtttataaatc

SEQ ID NO: 1889288 - DNA, 15 bp, Homo sapiens
tgagtttataaatca

SEQ ID NO: 1889289 - DNA, 15 bp, Homo sapiens
gagtttataaatcag

SEQ ID NO: 1889290 - DNA, 15 bp, Homo sapiens
agtttataaatcagt

SEQ ID NO: 1889291 - DNA, 15 bp, Homo sapiens
gtttataaatcagta

SEQ ID NO: 1889292 - DNA, 15 bp, Homo sapiens
tttataaatcagtaa

SEQ ID NO: 1889293 - DNA, 15 bp, Homo sapiens
ttataaatcagtaac

SEQ ID NO: 1889294 - DNA, 15 bp, Homo sapiens
tataaatcagtaaca

SEQ ID NO: 1889295 - DNA, 15 bp, Homo sapiens
ataaatcagtaacaa

SEQ ID NO: 1889296 - DNA, 15 bp, Homo sapiens
taaatcagtaacaat

SEQ ID NO: 1889297 - DNA, 15 bp, Homo sapiens
aaatcagtaacaatc

SEQ ID NO: 1889298 - DNA, 15 bp, Homo sapiens
aatcagtaacaatca

SEQ ID NO: 1889299 - DNA, 15 bp, Homo sapiens
atcagtaacaatcat

SEQ ID NO: 1889300 - DNA, 15 bp, Homo sapiens
tcagtaacaatcata

SEQ ID NO: 1889301 - DNA, 15 bp, Homo sapiens
cagtaacaatcatat

SEQ ID NO: 1889302 - DNA, 15 bp, Homo sapiens
agtaacaatcatata

SEQ ID NO: 1889303 - DNA, 15 bp, Homo sapiens
gtaacaatcatatac

SEQ ID NO: 1889304 - DNA, 15 bp, Homo sapiens
taacaatcatatact

SEQ ID NO: 1889305 - DNA, 15 bp, Homo sapiens
aacaatcatatactc

SEQ ID NO: 1889306 - DNA, 15 bp, Homo sapiens
acaatcatatactcc

SEQ ID NO: 1889307 - DNA, 15 bp, Homo sapiens
caatcatatactcct

SEQ ID NO: 1889308 - DNA, 15 bp, Homo sapiens
aatcatatactcctg

SEQ ID NO: 1889309 - DNA, 15 bp, Homo sapiens
atcatatactcctgt

SEQ ID NO: 1889310 - DNA, 15 bp, Homo sapiens
tcatatactcctgtg

SEQ ID NO: 1889311 - DNA, 15 bp, Homo sapiens
catatactcctgtgt

SEQ ID NO: 1889312 - DNA, 15 bp, Homo sapiens
atatactcctgtgtc

SEQ ID NO: 1889313 - DNA, 15 bp, Homo sapiens
tatactcctgtgtcc

SEQ ID NO: 1889314 - DNA, 15 bp, Homo sapiens
atactcctgtgtccc

SEQ ID NO: 1889315 - DNA, 15 bp, Homo sapiens
tactcctgtgtcccc

SEQ ID NO: 1889316 - DNA, 15 bp, Homo sapiens
actcctgtgtcccca

SEQ ID NO: 1889317 - DNA, 15 bp, Homo sapiens
ctcctgtgtccccac

SEQ ID NO: 1889318 - DNA, 15 bp, Homo sapiens
tcctgtgtccccaca

SEQ ID NO: 1889319 - DNA, 15 bp, Homo sapiens
cctgtgtccccacaa

SEQ ID NO: 1889320 - DNA, 15 bp, Homo sapiens
ctgtgtccccacaaa

SEQ ID NO: 1889321 - DNA, 15 bp, Homo sapiens
tgtgtccccacaaag

SEQ ID NO: 1889322 - DNA, 15 bp, Homo sapiens
gtgtccccacaaaga

SEQ ID NO: 1889323 - DNA, 15 bp, Homo sapiens
tgtccccacaaagat

SEQ ID NO: 1889324 - DNA, 15 bp, Homo sapiens
gtccccacaaagatt

SEQ ID NO: 1889325 - DNA, 15 bp, Homo sapiens
tccccacaaagatta

SEQ ID NO: 1889326 - DNA, 15 bp, Homo sapiens
ccccacaaagattac

SEQ ID NO: 1889327 - DNA, 15 bp, Homo sapiens
cccacaaagattacc

SEQ ID NO: 1889328 - DNA, 15 bp, Homo sapiens
ccacaaagattacca

SEQ ID NO: 1889329 - DNA, 15 bp, Homo sapiens
cacaaagattaccag

SEQ ID NO: 1889330 - DNA, 15 bp, Homo sapiens
acaaagattaccagt

SEQ ID NO: 1889331 - DNA, 15 bp, Homo sapiens
caaagattaccagtt

SEQ ID NO: 1889332 - DNA, 15 bp, Homo sapiens
aaagattaccagttg

SEQ ID NO: 1889333 - DNA, 15 bp, Homo sapiens
aagattaccagttga

SEQ ID NO: 1889334 - DNA, 15 bp, Homo sapiens
agattaccagttgat

SEQ ID NO: 1889335 - DNA, 15 bp, Homo sapiens
gattaccagttgatt

SEQ ID NO: 1889336 - DNA, 15 bp, Homo sapiens
attaccagttgattg

SEQ ID NO: 1889337 - DNA, 15 bp, Homo sapiens
ttaccagttgattgg

SEQ ID NO: 1889338 - DNA, 15 bp, Homo sapiens
taccagttgattgga

SEQ ID NO: 1889339 - DNA, 15 bp, Homo sapiens
accagttgattggac

SEQ ID NO: 1889340 - DNA, 15 bp, Homo sapiens
ccagttgattggaca

SEQ ID NO: 1889341 - DNA, 15 bp, Homo sapiens
cagttgattggacat

SEQ ID NO: 1889342 - DNA, 15 bp, Homo sapiens
agttgattggacata

SEQ ID NO: 1889343 - DNA, 15 bp, Homo sapiens
gttgattggacatat

SEQ ID NO: 1889344 - DNA, 15 bp, Homo sapiens
ttgattggacatata

SEQ ID NO: 1889345 - DNA, 15 bp, Homo sapiens
tgattggacatatat

SEQ ID NO: 1889346 - DNA, 15 bp, Homo sapiens
gattggacatatatc

SEQ ID NO: 1889347 - DNA, 15 bp, Homo sapiens
attggacatatatcc

SEQ ID NO: 1889348 - DNA, 15 bp, Homo sapiens
ttggacatatatcca

SEQ ID NO: 1889349 - DNA, 15 bp, Homo sapiens
tggacatatatccat

SEQ ID NO: 1889350 - DNA, 15 bp, Homo sapiens
ggacatatatccatg

SEQ ID NO: 1889351 - DNA, 15 bp, Homo sapiens
gacatatatccatgt

SEQ ID NO: 1889352 - DNA, 15 bp, Homo sapiens
acatatatccatgta

SEQ ID NO: 1889353 - DNA, 15 bp, Homo sapiens
catatatccatgtag

SEQ ID NO: 1889354 - DNA, 15 bp, Homo sapiens
atatatccatgtagt

SEQ ID NO: 1889355 - DNA, 15 bp, Homo sapiens
tatatccatgtagtc

SEQ ID NO: 1889356 - DNA, 15 bp, Homo sapiens
atatccatgtagtct

SEQ ID NO: 1889357 - DNA, 15 bp, Homo sapiens
tatccatgtagtctg

SEQ ID NO: 1889358 - DNA, 15 bp, Homo sapiens
atccatgtagtctgc

SEQ ID NO: 1889359 - DNA, 15 bp, Homo sapiens
tccatgtagtctgca

SEQ ID NO: 1889360 - DNA, 15 bp, Homo sapiens
ccatgtagtctgcag

SEQ ID NO: 1889361 - DNA, 15 bp, Homo sapiens
catgtagtctgcagt

SEQ ID NO: 1889362 - DNA, 15 bp, Homo sapiens
atgtagtctgcagtc

SEQ ID NO: 1889363 - DNA, 15 bp, Homo sapiens
tgtagtctgcagtct

SEQ ID NO: 1889364 - DNA, 15 bp, Homo sapiens
gtagtctgcagtctg

SEQ ID NO: 1889365 - DNA, 15 bp, Homo sapiens
tagtctgcagtctga

SEQ ID NO: 1889366 - DNA, 15 bp, Homo sapiens
agtctgcagtctgat

SEQ ID NO: 1889367 - DNA, 15 bp, Homo sapiens
gtctgcagtctgatt

SEQ ID NO: 1889368 - DNA, 15 bp, Homo sapiens
tctgcagtctgattt

SEQ ID NO: 1889369 - DNA, 15 bp, Homo sapiens
ctgcagtctgatttt

SEQ ID NO: 1889370 - DNA, 15 bp, Homo sapiens
tgcagtctgattttg

SEQ ID NO: 1889371 - DNA, 15 bp, Homo sapiens
gcagtctgattttga

SEQ ID NO: 1889372 - DNA, 15 bp, Homo sapiens
cagtctgattttgat

SEQ ID NO: 1889373 - DNA, 15 bp, Homo sapiens
agtctgattttgatt

SEQ ID NO: 1889374 - DNA, 15 bp, Homo sapiens
gtctgattttgattt

SEQ ID NO: 1889375 - DNA, 15 bp, Homo sapiens
tctgattttgatttt

SEQ ID NO: 1889376 - DNA, 15 bp, Homo sapiens
ctgattttgattttt

SEQ ID NO: 1889377 - DNA, 15 bp, Homo sapiens
gattttgatttttgc

SEQ ID NO: 1889378 - DNA, 15 bp, Homo sapiens
attttgatttttgcc

SEQ ID NO: 1889379 - DNA, 15 bp, Homo sapiens
ttttgatttttgcca

SEQ ID NO: 1889380 - DNA, 15 bp, Homo sapiens
tttgatttttgccat

SEQ ID NO: 1889381 - DNA, 15 bp, Homo sapiens
ttgatttttgccatt

SEQ ID NO: 1889382 - DNA, 15 bp, Homo sapiens
tgatttttgccattg

SEQ ID NO: 1889383 - DNA, 15 bp, Homo sapiens
gatttttgccattga

SEQ ID NO: 1889384 - DNA, 15 bp, Homo sapiens
atttttgccattgag

SEQ ID NO: 1889385 - DNA, 15 bp, Homo sapiens
tttttgccattgaga

SEQ ID NO: 1889386 - DNA, 15 bp, Homo sapiens
ttttgccattgagat

SEQ ID NO: 1889387 - DNA, 15 bp, Homo sapiens
tttgccattgagata

SEQ ID NO: 1889388 - DNA, 15 bp, Homo sapiens
ttgccattgagataa

SEQ ID NO: 1889389 - DNA, 15 bp, Homo sapiens
tgccattgagataac

SEQ ID NO: 1889390 - DNA, 15 bp, Homo sapiens
gccattgagataact

SEQ ID NO: 1889391 - DNA, 15 bp, Homo sapiens
ccattgagataactt

SEQ ID NO: 1889392 - DNA, 15 bp, Homo sapiens
cattgagataacttc

SEQ ID NO: 1889393 - DNA, 15 bp, Homo sapiens
attgagataacttct

SEQ ID NO: 1889394 - DNA, 15 bp, Homo sapiens
ttgagataacttcta

SEQ ID NO: 1889395 - DNA, 15 bp, Homo sapiens
tgagataacttctaa

SEQ ID NO: 1889396 - DNA, 15 bp, Homo sapiens
gagataacttctaat

SEQ ID NO: 1889397 - DNA, 15 bp, Homo sapiens
agataacttctaatg

SEQ ID NO: 1889398 - DNA, 15 bp, Homo sapiens
gataacttctaatgc

SEQ ID NO: 1889399 - DNA, 15 bp, Homo sapiens
ataacttctaatgct

SEQ ID NO: 1889400 - DNA, 15 bp, Homo sapiens
taacttctaatgctt

SEQ ID NO: 1889401 - DNA, 15 bp, Homo sapiens
aacttctaatgcttt

SEQ ID NO: 1889402 - DNA, 15 bp, Homo sapiens
acttctaatgcttta

SEQ ID NO: 1889403 - DNA, 15 bp, Homo sapiens
cttctaatgctttat

SEQ ID NO: 1889404 - DNA, 15 bp, Homo sapiens
ttctaatgctttatt

SEQ ID NO: 1889405 - DNA, 15 bp, Homo sapiens
tctaatgctttatta

SEQ ID NO: 1889406 - DNA, 15 bp, Homo sapiens
ctaatgctttattat

SEQ ID NO: 1889407 - DNA, 15 bp, Homo sapiens
taatgctttattatt

SEQ ID NO: 1889408 - DNA, 15 bp, Homo sapiens
aatgctttattattc

SEQ ID NO: 1889409 - DNA, 15 bp, Homo sapiens
atgctttattattcc

SEQ ID NO: 1889410 - DNA, 15 bp, Homo sapiens
tgctttattattcca

SEQ ID NO: 1889411 - DNA, 15 bp, Homo sapiens
gctttattattccag

SEQ ID NO: 1889412 - DNA, 15 bp, Homo sapiens
ctttattattccagg

SEQ ID NO: 1889413 - DNA, 15 bp, Homo sapiens
tttattattccaggt

SEQ ID NO: 1889414 - DNA, 15 bp, Homo sapiens
ttattattccaggta

SEQ ID NO: 1889415 - DNA, 15 bp, Homo sapiens
tattattccaggtat

SEQ ID NO: 1889416 - DNA, 15 bp, Homo sapiens
attattccaggtatt

SEQ ID NO: 1889417 - DNA, 15 bp, Homo sapiens
ttattccaggtatta

SEQ ID NO: 1889418 - DNA, 15 bp, Homo sapiens
tattccaggtattag

SEQ ID NO: 1889419 - DNA, 15 bp, Homo sapiens
attccaggtattagt

SEQ ID NO: 1889420 - DNA, 15 bp, Homo sapiens
ttccaggtattagtc

SEQ ID NO: 1889421 - DNA, 15 bp, Homo sapiens
tccaggtattagtct

SEQ ID NO: 1889422 - DNA, 15 bp, Homo sapiens
ccaggtattagtcta

SEQ ID NO: 1889423 - DNA, 15 bp, Homo sapiens
caggtattagtctaa

SEQ ID NO: 1889424 - DNA, 15 bp, Homo sapiens
aggtattagtctaaa

SEQ ID NO: 1889425 - DNA, 15 bp, Homo sapiens
ggtattagtctaaaa

SEQ ID NO: 1889426 - DNA, 15 bp, Homo sapiens
gtattagtctaaaat

SEQ ID NO: 1889427 - DNA, 15 bp, Homo sapiens
tattagtctaaaata

SEQ ID NO: 1889428 - DNA, 15 bp, Homo sapiens
attagtctaaaatac

SEQ ID NO: 1889429 - DNA, 15 bp, Homo sapiens
ttagtctaaaatact

SEQ ID NO: 1889430 - DNA, 15 bp, Homo sapiens
tagtctaaaatacta

SEQ ID NO: 1889431 - DNA, 15 bp, Homo sapiens
agtctaaaatactat

SEQ ID NO: 1889432 - DNA, 15 bp, Homo sapiens
gtctaaaatactata

SEQ ID NO: 1889433 - DNA, 15 bp, Homo sapiens
tctaaaatactatat

SEQ ID NO: 1889434 - DNA, 15 bp, Homo sapiens
ctaaaatactatatt

SEQ ID NO: 1889435 - DNA, 15 bp, Homo sapiens
taaaatactatattg

SEQ ID NO: 1889436 - DNA, 15 bp, Homo sapiens
aaaatactatattgc

SEQ ID NO: 1889437 - DNA, 15 bp, Homo sapiens
aaatactatattgct

SEQ ID NO: 1889438 - DNA, 15 bp, Homo sapiens
aatactatattgcta

SEQ ID NO: 1889439 - DNA, 15 bp, Homo sapiens
atactatattgctat

SEQ ID NO: 1889440 - DNA, 15 bp, Homo sapiens
tactatattgctatc

SEQ ID NO: 1889441 - DNA, 15 bp, Homo sapiens
actatattgctatcc

SEQ ID NO: 1889442 - DNA, 15 bp, Homo sapiens
ctatattgctatcct

SEQ ID NO: 1889443 - DNA, 15 bp, Homo sapiens
tatattgctatcctc

SEQ ID NO: 1889444 - DNA, 15 bp, Homo sapiens
atattgctatcctca

SEQ ID NO: 1889445 - DNA, 15 bp, Homo sapiens
tattgctatcctcag

SEQ ID NO: 1889446 - DNA, 15 bp, Homo sapiens
attgctatcctcagg

SEQ ID NO: 1889447 - DNA, 15 bp, Homo sapiens
ttgctatcctcagga

SEQ ID NO: 1889448 - DNA, 15 bp, Homo sapiens
tgctatcctcaggat

SEQ ID NO: 1889449 - DNA, 15 bp, Homo sapiens
gctatcctcaggatt

SEQ ID NO: 1889450 - DNA, 15 bp, Homo sapiens
ctatcctcaggattt

SEQ ID NO: 1889451 - DNA, 15 bp, Homo sapiens
tatcctcaggatttt

SEQ ID NO: 1889452 - DNA, 15 bp, Homo sapiens
atcctcaggattttt

SEQ ID NO: 1889453 - DNA, 15 bp, Homo sapiens
tcctcaggatttttc

SEQ ID NO: 1889454 - DNA, 15 bp, Homo sapiens
cctcaggatttttca

SEQ ID NO: 1889455 - DNA, 15 bp, Homo sapiens
ctcaggatttttcat

SEQ ID NO: 1889456 - DNA, 15 bp, Homo sapiens
tcaggatttttcata

SEQ ID NO: 1889457 - DNA, 15 bp, Homo sapiens
caggatttttcatac

SEQ ID NO: 1889458 - DNA, 15 bp, Homo sapiens
aggatttttcatact

SEQ ID NO: 1889459 - DNA, 15 bp, Homo sapiens
ggatttttcatactc

SEQ ID NO: 1889460 - DNA, 15 bp, Homo sapiens
gatttttcatactct

SEQ ID NO: 1889461 - DNA, 15 bp, Homo sapiens
atttttcatactctt

SEQ ID NO: 1889462 - DNA, 15 bp, Homo sapiens
tttttcatactcttg

SEQ ID NO: 1889463 - DNA, 15 bp, Homo sapiens
ttttcatactcttgt

SEQ ID NO: 1889464 - DNA, 15 bp, Homo sapiens
tttcatactcttgta

SEQ ID NO: 1889465 - DNA, 15 bp, Homo sapiens
ttcatactcttgtat

SEQ ID NO: 1889466 - DNA, 15 bp, Homo sapiens
tcatactcttgtatt

SEQ ID NO: 1889467 - DNA, 15 bp, Homo sapiens
catactcttgtattt

SEQ ID NO: 1889468 - DNA, 15 bp, Homo sapiens
atactcttgtatttt

SEQ ID NO: 1889469 - DNA, 15 bp, Homo sapiens
tactcttgtattttc

SEQ ID NO: 1889470 - DNA, 15 bp, Homo sapiens
actcttgtattttca

SEQ ID NO: 1889471 - DNA, 15 bp, Homo sapiens
ctcttgtattttcaa

SEQ ID NO: 1889472 - DNA, 15 bp, Homo sapiens
cttgtattttcaatt

SEQ ID NO: 1889473 - DNA, 15 bp, Homo sapiens
ttgtattttcaattt

SEQ ID NO: 1889474 - DNA, 15 bp, Homo sapiens
tgtattttcaatttg

SEQ ID NO: 1889475 - DNA, 15 bp, Homo sapiens
gtattttcaatttgt

SEQ ID NO: 1889476 - DNA, 15 bp, Homo sapiens
tattttcaatttgtg

SEQ ID NO: 1889477 - DNA, 15 bp, Homo sapiens
attttcaatttgtga

SEQ ID NO: 1889478 - DNA, 15 bp, Homo sapiens
ttttcaatttgtgat

SEQ ID NO: 1889479 - DNA, 15 bp, Homo sapiens
tttcaatttgtgatt

SEQ ID NO: 1889480 - DNA, 15 bp, Homo sapiens
ttcaatttgtgattc

SEQ ID NO: 1889481 - DNA, 15 bp, Homo sapiens
tcaatttgtgattca

SEQ ID NO: 1889482 - DNA, 15 bp, Homo sapiens
caatttgtgattcaa

SEQ ID NO: 1889483 - DNA, 15 bp, Homo sapiens
aatttgtgattcaac

SEQ ID NO: 1889484 - DNA, 15 bp, Homo sapiens
atttgtgattcaaca

SEQ ID NO: 1889485 - DNA, 15 bp, Homo sapiens
tttgtgattcaacat

SEQ ID NO: 1889486 - DNA, 15 bp, Homo sapiens
ttgtgattcaacatt

SEQ ID NO: 1889487 - DNA, 15 bp, Homo sapiens
tgtgattcaacatta

SEQ ID NO: 1889488 - DNA, 15 bp, Homo sapiens
gtgattcaacattat

SEQ ID NO: 1889489 - DNA, 15 bp, Homo sapiens
tgattcaacattata

SEQ ID NO: 1889490 - DNA, 15 bp, Homo sapiens
gattcaacattatag

SEQ ID NO: 1889491 - DNA, 15 bp, Homo sapiens
attcaacattatagg

SEQ ID NO: 1889492 - DNA, 15 bp, Homo sapiens
ttcaacattataggt

SEQ ID NO: 1889493 - DNA, 15 bp, Homo sapiens
tcaacattataggtg

SEQ ID NO: 1889494 - DNA, 15 bp, Homo sapiens
caacattataggtgg

SEQ ID NO: 1889495 - DNA, 15 bp, Homo sapiens
aacattataggtggg

SEQ ID NO: 1889496 - DNA, 15 bp, Homo sapiens
acattataggtgggc

SEQ ID NO: 1889497 - DNA, 15 bp, Homo sapiens
cattataggtgggca

SEQ ID NO: 1889498 - DNA, 15 bp, Homo sapiens
attataggtgggcag

SEQ ID NO: 1889499 - DNA, 15 bp, Homo sapiens
ttataggtgggcagt

SEQ ID NO: 1889500 - DNA, 15 bp, Homo sapiens
tataggtgggcagtt

SEQ ID NO: 1889501 - DNA, 15 bp, Homo sapiens
ataggtgggcagttt

SEQ ID NO: 1889502 - DNA, 15 bp, Homo sapiens
taggtgggcagtttt

SEQ ID NO: 1889503 - DNA, 15 bp, Homo sapiens
aggtgggcagtttta

SEQ ID NO: 1889504 - DNA, 15 bp, Homo sapiens
ggtgggcagttttat

SEQ ID NO: 1889505 - DNA, 15 bp, Homo sapiens
gtgggcagttttatt

SEQ ID NO: 1889506 - DNA, 15 bp, Homo sapiens
tgggcagttttattc

SEQ ID NO: 1889507 - DNA, 15 bp, Homo sapiens
gggcagttttattcc

SEQ ID NO: 1889508 - DNA, 15 bp, Homo sapiens
ggcagttttattcca

SEQ ID NO: 1889509 - DNA, 15 bp, Homo sapiens
gcagttttattccag

SEQ ID NO: 1889510 - DNA, 15 bp, Homo sapiens
cagttttattccagg

SEQ ID NO: 1889511 - DNA, 15 bp, Homo sapiens
agttttattccaggt

SEQ ID NO: 1889512 - DNA, 15 bp, Homo sapiens
gttttattccaggtg

SEQ ID NO: 1889513 - DNA, 15 bp, Homo sapiens
ttttattccaggtgg

SEQ ID NO: 1889514 - DNA, 15 bp, Homo sapiens
tttattccaggtggc

SEQ ID NO: 1889515 - DNA, 15 bp, Homo sapiens
ttattccaggtggct

SEQ ID NO: 1889516 - DNA, 15 bp, Homo sapiens
tattccaggtggctg

SEQ ID NO: 1889517 - DNA, 15 bp, Homo sapiens
attccaggtggctga

SEQ ID NO: 1889518 - DNA, 15 bp, Homo sapiens
ttccaggtggctgat

SEQ ID NO: 1889519 - DNA, 15 bp, Homo sapiens
tccaggtggctgatc

SEQ ID NO: 1889520 - DNA, 15 bp, Homo sapiens
ccaggtggctgatcc

SEQ ID NO: 1889521 - DNA, 15 bp, Homo sapiens
caggtggctgatcct

SEQ ID NO: 1889522 - DNA, 15 bp, Homo sapiens
aggtggctgatcctg

SEQ ID NO: 1889523 - DNA, 15 bp, Homo sapiens
ggtggctgatcctgg

SEQ ID NO: 1889524 - DNA, 15 bp, Homo sapiens
gtggctgatcctggt

SEQ ID NO: 1889525 - DNA, 15 bp, Homo sapiens
tggctgatcctggtt

SEQ ID NO: 1889526 - DNA, 15 bp, Homo sapiens
ggctgatcctggttc

SEQ ID NO: 1889527 - DNA, 15 bp, Homo sapiens
gctgatcctggttct

SEQ ID NO: 1889528 - DNA, 15 bp, Homo sapiens
ctgatcctggttcta

SEQ ID NO: 1889529 - DNA, 15 bp, Homo sapiens
tgatcctggttctat

SEQ ID NO: 1889530 - DNA, 15 bp, Homo sapiens
gatcctggttctata

SEQ ID NO: 1889531 - DNA, 15 bp, Homo sapiens
atcctggttctataa

SEQ ID NO: 1889532 - DNA, 15 bp, Homo sapiens
tcctggttctataat

SEQ ID NO: 1889533 - DNA, 15 bp, Homo sapiens
cctggttctataatg

SEQ ID NO: 1889534 - DNA, 15 bp, Homo sapiens
ctggttctataatgt

SEQ ID NO: 1889535 - DNA, 15 bp, Homo sapiens
tggttctataatgtt

SEQ ID NO: 1889536 - DNA, 15 bp, Homo sapiens
ggttctataatgttc

SEQ ID NO: 1889537 - DNA, 15 bp, Homo sapiens
gttctataatgttct

SEQ ID NO: 1889538 - DNA, 15 bp, Homo sapiens
ttctataatgttctt

SEQ ID NO: 1889539 - DNA, 15 bp, Homo sapiens
tctataatgttcttc

SEQ ID NO: 1889540 - DNA, 15 bp, Homo sapiens
ctataatgttcttca

SEQ ID NO: 1889541 - DNA, 15 bp, Homo sapiens
tataatgttcttcac

SEQ ID NO: 1889542 - DNA, 15 bp, Homo sapiens
ataatgttcttcaca

SEQ ID NO: 1889543 - DNA, 15 bp, Homo sapiens
taatgttcttcacac

SEQ ID NO: 1889544 - DNA, 15 bp, Homo sapiens
aatgttcttcacaca

SEQ ID NO: 1889545 - DNA, 15 bp, Homo sapiens
atgttcttcacacag

SEQ ID NO: 1889546 - DNA, 15 bp, Homo sapiens
tgttcttcacacagt

SEQ ID NO: 1889547 - DNA, 15 bp, Homo sapiens
gttcttcacacagtg

SEQ ID NO: 1889548 - DNA, 15 bp, Homo sapiens
ttcttcacacagtga

SEQ ID NO: 1889549 - DNA, 15 bp, Homo sapiens
tcttcacacagtgac

SEQ ID NO: 1889550 - DNA, 15 bp, Homo sapiens
cttcacacagtgact

SEQ ID NO: 1889551 - DNA, 15 bp, Homo sapiens
ttcacacagtgacta

SEQ ID NO: 1889552 - DNA, 15 bp, Homo sapiens
tcacacagtgactaa

SEQ ID NO: 1889553 - DNA, 15 bp, Homo sapiens
cacacagtgactaaa

SEQ ID NO: 1889554 - DNA, 15 bp, Homo sapiens
acacagtgactaaaa

SEQ ID NO: 1889555 - DNA, 15 bp, Homo sapiens
cacagtgactaaaat

SEQ ID NO: 1889556 - DNA, 15 bp, Homo sapiens
acagtgactaaaata

SEQ ID NO: 1889557 - DNA, 15 bp, Homo sapiens
cagtgactaaaatag

SEQ ID NO: 1889558 - DNA, 15 bp, Homo sapiens
agtgactaaaatagc

SEQ ID NO: 1889559 - DNA, 15 bp, Homo sapiens
gtgactaaaatagca

SEQ ID NO: 1889560 - DNA, 15 bp, Homo sapiens
tgactaaaatagcag

SEQ ID NO: 1889561 - DNA, 15 bp, Homo sapiens
gactaaaatagcagc

SEQ ID NO: 1889562 - DNA, 15 bp, Homo sapiens
actaaaatagcagca

SEQ ID NO: 1889563 - DNA, 15 bp, Homo sapiens
ctaaaatagcagcaa

SEQ ID NO: 1889564 - DNA, 15 bp, Homo sapiens
taaaatagcagcaac

SEQ ID NO: 1889565 - DNA, 15 bp, Homo sapiens
aaaatagcagcaaca

SEQ ID NO: 1889566 - DNA, 15 bp, Homo sapiens
aaatagcagcaacag

SEQ ID NO: 1889567 - DNA, 15 bp, Homo sapiens
aatagcagcaacagc

SEQ ID NO: 1889568 - DNA, 15 bp, Homo sapiens
atagcagcaacagct

SEQ ID NO: 1889569 - DNA, 15 bp, Homo sapiens
tagcagcaacagcta

SEQ ID NO: 1889570 - DNA, 15 bp, Homo sapiens
agcagcaacagctag

SEQ ID NO: 1889571 - DNA, 15 bp, Homo sapiens
gcagcaacagctagc

SEQ ID NO: 1889572 - DNA, 15 bp, Homo sapiens
cagcaacagctagca

SEQ ID NO: 1889573 - DNA, 15 bp, Homo sapiens
agcaacagctagcat

SEQ ID NO: 1889574 - DNA, 15 bp, Homo sapiens
gcaacagctagcatt

SEQ ID NO: 1889575 - DNA, 15 bp, Homo sapiens
caacagctagcattt

SEQ ID NO: 1889576 - DNA, 15 bp, Homo sapiens
aacagctagcattta

SEQ ID NO: 1889577 - DNA, 15 bp, Homo sapiens
acagctagcatttat

SEQ ID NO: 1889578 - DNA, 15 bp, Homo sapiens
cagctagcatttatt

SEQ ID NO: 1889579 - DNA, 15 bp, Homo sapiens
agctagcatttattg

SEQ ID NO: 1889580 - DNA, 15 bp, Homo sapiens
gctagcatttattga

SEQ ID NO: 1889581 - DNA, 15 bp, Homo sapiens
ctagcatttattgag

SEQ ID NO: 1889582 - DNA, 15 bp, Homo sapiens
tagcatttattgagt

SEQ ID NO: 1889583 - DNA, 15 bp, Homo sapiens
agcatttattgagtt

SEQ ID NO: 1889584 - DNA, 15 bp, Homo sapiens
gcatttattgagttc

SEQ ID NO: 1889585 - DNA, 15 bp, Homo sapiens
catttattgagttct

SEQ ID NO: 1889586 - DNA, 15 bp, Homo sapiens
atttattgagttctt

SEQ ID NO: 1889587 - DNA, 15 bp, Homo sapiens
tttattgagttcttg

SEQ ID NO: 1889588 - DNA, 15 bp, Homo sapiens
ttattgagttcttgt

SEQ ID NO: 1889589 - DNA, 15 bp, Homo sapiens
tattgagttcttgta

SEQ ID NO: 1889590 - DNA, 15 bp, Homo sapiens
attgagttcttgtaa

SEQ ID NO: 1889591 - DNA, 15 bp, Homo sapiens
ttgagttcttgtaat

SEQ ID NO: 1889592 - DNA, 15 bp, Homo sapiens
tgagttcttgtaatg

SEQ ID NO: 1889593 - DNA, 15 bp, Homo sapiens
gagttcttgtaatgt

SEQ ID NO: 1889594 - DNA, 15 bp, Homo sapiens
agttcttgtaatgta

SEQ ID NO: 1889595 - DNA, 15 bp, Homo sapiens
gttcttgtaatgtat

SEQ ID NO: 1889596 - DNA, 15 bp, Homo sapiens
ttcttgtaatgtatc

SEQ ID NO: 1889597 - DNA, 15 bp, Homo sapiens
tcttgtaatgtatca

SEQ ID NO: 1889598 - DNA, 15 bp, Homo sapiens
cttgtaatgtatcag

SEQ ID NO: 1889599 - DNA, 15 bp, Homo sapiens
ttgtaatgtatcagt

SEQ ID NO: 1889600 - DNA, 15 bp, Homo sapiens
tgtaatgtatcagta

SEQ ID NO: 1889601 - DNA, 15 bp, Homo sapiens
gtaatgtatcagtat

SEQ ID NO: 1889602 - DNA, 15 bp, Homo sapiens
taatgtatcagtatc

SEQ ID NO: 1889603 - DNA, 15 bp, Homo sapiens
aatgtatcagtatca

SEQ ID NO: 1889604 - DNA, 15 bp, Homo sapiens
atgtatcagtatcat

SEQ ID NO: 1889605 - DNA, 15 bp, Homo sapiens
tgtatcagtatcata

SEQ ID NO: 1889606 - DNA, 15 bp, Homo sapiens
gtatcagtatcatac

SEQ ID NO: 1889607 - DNA, 15 bp, Homo sapiens
tatcagtatcataca

SEQ ID NO: 1889608 - DNA, 15 bp, Homo sapiens
atcagtatcatacat

SEQ ID NO: 1889609 - DNA, 15 bp, Homo sapiens
tcagtatcatacatg

SEQ ID NO: 1889610 - DNA, 15 bp, Homo sapiens
cagtatcatacatga

SEQ ID NO: 1889611 - DNA, 15 bp, Homo sapiens
agtatcatacatgat

SEQ ID NO: 1889612 - DNA, 15 bp, Homo sapiens
gtatcatacatgatt

SEQ ID NO: 1889613 - DNA, 15 bp, Homo sapiens
tatcatacatgattc

SEQ ID NO: 1889614 - DNA, 15 bp, Homo sapiens
atcatacatgattca

SEQ ID NO: 1889615 - DNA, 15 bp, Homo sapiens
tcatacatgattcaa

SEQ ID NO: 1889616 - DNA, 15 bp, Homo sapiens
catacatgattcaaa

SEQ ID NO: 1889617 - DNA, 15 bp, Homo sapiens
atacatgattcaaac

SEQ ID NO: 1889618 - DNA, 15 bp, Homo sapiens
tacatgattcaaacc

SEQ ID NO: 1889619 - DNA, 15 bp, Homo sapiens
acatgattcaaacca

SEQ ID NO: 1889620 - DNA, 15 bp, Homo sapiens
catgattcaaaccac

SEQ ID NO: 1889621 - DNA, 15 bp, Homo sapiens
atgattcaaaccaca

SEQ ID NO: 1889622 - DNA, 15 bp, Homo sapiens
tgattcaaaccacaa

SEQ ID NO: 1889623 - DNA, 15 bp, Homo sapiens
gattcaaaccacaag

SEQ ID NO: 1889624 - DNA, 15 bp, Homo sapiens
attcaaaccacaagc

SEQ ID NO: 1889625 - DNA, 15 bp, Homo sapiens
ttcaaaccacaagca

SEQ ID NO: 1889626 - DNA, 15 bp, Homo sapiens
tcaaaccacaagcat

SEQ ID NO: 1889627 - DNA, 15 bp, Homo sapiens
caaaccacaagcata

SEQ ID NO: 1889628 - DNA, 15 bp, Homo sapiens
aaaccacaagcatat

SEQ ID NO: 1889629 - DNA, 15 bp, Homo sapiens
aaccacaagcatatt

SEQ ID NO: 1889630 - DNA, 15 bp, Homo sapiens
accacaagcatattt

SEQ ID NO: 1889631 - DNA, 15 bp, Homo sapiens
ccacaagcatatttg

SEQ ID NO: 1889632 - DNA, 15 bp, Homo sapiens
cacaagcatatttgg

SEQ ID NO: 1889633 - DNA, 15 bp, Homo sapiens
acaagcatatttggt

SEQ ID NO: 1889634 - DNA, 15 bp, Homo sapiens
caagcatatttggta

SEQ ID NO: 1889635 - DNA, 15 bp, Homo sapiens
aagcatatttggtag

SEQ ID NO: 1889636 - DNA, 15 bp, Homo sapiens
agcatatttggtaga

SEQ ID NO: 1889637 - DNA, 15 bp, Homo sapiens
gcatatttggtagat

SEQ ID NO: 1889638 - DNA, 15 bp, Homo sapiens
catatttggtagata

SEQ ID NO: 1889639 - DNA, 15 bp, Homo sapiens
atatttggtagatac

SEQ ID NO: 1889640 - DNA, 15 bp, Homo sapiens
tatttggtagatact

SEQ ID NO: 1889641 - DNA, 15 bp, Homo sapiens
atttggtagatactg

SEQ ID NO: 1889642 - DNA, 15 bp, Homo sapiens
tttggtagatactgt

SEQ ID NO: 1889643 - DNA, 15 bp, Homo sapiens
ttggtagatactgtt

SEQ ID NO: 1889644 - DNA, 15 bp, Homo sapiens
tggtagatactgttg

SEQ ID NO: 1889645 - DNA, 15 bp, Homo sapiens
ggtagatactgttgt

SEQ ID NO: 1889646 - DNA, 15 bp, Homo sapiens
gtagatactgttgtt

SEQ ID NO: 1889647 - DNA, 15 bp, Homo sapiens
tagatactgttgtta

SEQ ID NO: 1889648 - DNA, 15 bp, Homo sapiens
agatactgttgttag

SEQ ID NO: 1889649 - DNA, 15 bp, Homo sapiens
gatactgttgttagc

SEQ ID NO: 1889650 - DNA, 15 bp, Homo sapiens
atactgttgttagcc

SEQ ID NO: 1889651 - DNA, 15 bp, Homo sapiens
tactgttgttagccc

SEQ ID NO: 1889652 - DNA, 15 bp, Homo sapiens
actgttgttagcccc

SEQ ID NO: 1889653 - DNA, 15 bp, Homo sapiens
ctgttgttagcccca

SEQ ID NO: 1889654 - DNA, 15 bp, Homo sapiens
tgttgttagccccat

SEQ ID NO: 1889655 - DNA, 15 bp, Homo sapiens
gttgttagccccatt

SEQ ID NO: 1889656 - DNA, 15 bp, Homo sapiens
ttgttagccccattt

SEQ ID NO: 1889657 - DNA, 15 bp, Homo sapiens
tgttagccccatttt

SEQ ID NO: 1889658 - DNA, 15 bp, Homo sapiens
gttagccccattttg

SEQ ID NO: 1889659 - DNA, 15 bp, Homo sapiens
ttagccccattttgc

SEQ ID NO: 1889660 - DNA, 15 bp, Homo sapiens
tagccccattttgca

SEQ ID NO: 1889661 - DNA, 15 bp, Homo sapiens
agccccattttgcag

SEQ ID NO: 1889662 - DNA, 15 bp, Homo sapiens
gccccattttgcagg

SEQ ID NO: 1889663 - DNA, 15 bp, Homo sapiens
ccccattttgcaggt

SEQ ID NO: 1889664 - DNA, 15 bp, Homo sapiens
cccattttgcaggta

SEQ ID NO: 1889665 - DNA, 15 bp, Homo sapiens
ccattttgcaggtat

SEQ ID NO: 1889666 - DNA, 15 bp, Homo sapiens
cattttgcaggtatg

SEQ ID NO: 1889667 - DNA, 15 bp, Homo sapiens
attttgcaggtatgg

SEQ ID NO: 1889668 - DNA, 15 bp, Homo sapiens
ttttgcaggtatggt

SEQ ID NO: 1889669 - DNA, 15 bp, Homo sapiens
tttgcaggtatggta

SEQ ID NO: 1889670 - DNA, 15 bp, Homo sapiens
ttgcaggtatggtaa

SEQ ID NO: 1889671 - DNA, 15 bp, Homo sapiens
tgcaggtatggtaac

SEQ ID NO: 1889672 - DNA, 15 bp, Homo sapiens
gcaggtatggtaact

SEQ ID NO: 1889673 - DNA, 15 bp, Homo sapiens
caggtatggtaactg

SEQ ID NO: 1889674 - DNA, 15 bp, Homo sapiens
aggtatggtaactgg

SEQ ID NO: 1889675 - DNA, 15 bp, Homo sapiens
ggtatggtaactggt

SEQ ID NO: 1889676 - DNA, 15 bp, Homo sapiens
gtatggtaactggta

SEQ ID NO: 1889677 - DNA, 15 bp, Homo sapiens
tatggtaactggtac

SEQ ID NO: 1889678 - DNA, 15 bp, Homo sapiens
atggtaactggtaca

SEQ ID NO: 1889679 - DNA, 15 bp, Homo sapiens
tggtaactggtacaa

SEQ ID NO: 1889680 - DNA, 15 bp, Homo sapiens
ggtaactggtacaaa

SEQ ID NO: 1889681 - DNA, 15 bp, Homo sapiens
gtaactggtacaaaa

SEQ ID NO: 1889682 - DNA, 15 bp, Homo sapiens
taactggtacaaaaa

SEQ ID NO: 1889683 - DNA, 15 bp, Homo sapiens
aactggtacaaaaag

SEQ ID NO: 1889684 - DNA, 15 bp, Homo sapiens
actggtacaaaaaga

SEQ ID NO: 1889685 - DNA, 15 bp, Homo sapiens
ctggtacaaaaagaa

SEQ ID NO: 1889686 - DNA, 15 bp, Homo sapiens
tggtacaaaaagaag

SEQ ID NO: 1889687 - DNA, 15 bp, Homo sapiens
ggtacaaaaagaagg

SEQ ID NO: 1889688 - DNA, 15 bp, Homo sapiens
gtacaaaaagaaggt

SEQ ID NO: 1889689 - DNA, 15 bp, Homo sapiens
tacaaaaagaaggta

SEQ ID NO: 1889690 - DNA, 15 bp, Homo sapiens
acaaaaagaaggtaa

SEQ ID NO: 1889691 - DNA, 15 bp, Homo sapiens
caaaaagaaggtaat

SEQ ID NO: 1889692 - DNA, 15 bp, Homo sapiens
aaaaagaaggtaatt

SEQ ID NO: 1889693 - DNA, 15 bp, Homo sapiens
aaaagaaggtaattg

SEQ ID NO: 1889694 - DNA, 15 bp, Homo sapiens
aaagaaggtaattgc

SEQ ID NO: 1889695 - DNA, 15 bp, Homo sapiens
aagaaggtaattgct

SEQ ID NO: 1889696 - DNA, 15 bp, Homo sapiens
agaaggtaattgctc

SEQ ID NO: 1889697 - DNA, 15 bp, Homo sapiens
gaaggtaattgctca

SEQ ID NO: 1889698 - DNA, 15 bp, Homo sapiens
aaggtaattgctcac

SEQ ID NO: 1889699 - DNA, 15 bp, Homo sapiens
aggtaattgctcaca

SEQ ID NO: 1889700 - DNA, 15 bp, Homo sapiens
ggtaattgctcacag

SEQ ID NO: 1889701 - DNA, 15 bp, Homo sapiens
gtaattgctcacagg

SEQ ID NO: 1889702 - DNA, 15 bp, Homo sapiens
taattgctcacagga

SEQ ID NO: 1889703 - DNA, 15 bp, Homo sapiens
aattgctcacaggaa

SEQ ID NO: 1889704 - DNA, 15 bp, Homo sapiens
attgctcacaggaag

SEQ ID NO: 1889705 - DNA, 15 bp, Homo sapiens
ttgctcacaggaaga

SEQ ID NO: 1889706 - DNA, 15 bp, Homo sapiens
tgctcacaggaagag

SEQ ID NO: 1889707 - DNA, 15 bp, Homo sapiens
gctcacaggaagagc

SEQ ID NO: 1889708 - DNA, 15 bp, Homo sapiens
ctcacaggaagagcc

SEQ ID NO: 1889709 - DNA, 15 bp, Homo sapiens
tcacaggaagagcct

SEQ ID NO: 1889710 - DNA, 15 bp, Homo sapiens
cacaggaagagccta

SEQ ID NO: 1889711 - DNA, 15 bp, Homo sapiens
acaggaagagcctat

SEQ ID NO: 1889712 - DNA, 15 bp, Homo sapiens
caggaagagcctata

SEQ ID NO: 1889713 - DNA, 15 bp, Homo sapiens
aggaagagcctataa

SEQ ID NO: 1889714 - DNA, 15 bp, Homo sapiens
ggaagagcctataat

SEQ ID NO: 1889715 - DNA, 15 bp, Homo sapiens
gaagagcctataata

SEQ ID NO: 1889716 - DNA, 15 bp, Homo sapiens
aagagcctataatat

SEQ ID NO: 1889717 - DNA, 15 bp, Homo sapiens
agagcctataatatc

SEQ ID NO: 1889718 - DNA, 15 bp, Homo sapiens
gagcctataatatca

SEQ ID NO: 1889719 - DNA, 15 bp, Homo sapiens
agcctataatatcaa

SEQ ID NO: 1889720 - DNA, 15 bp, Homo sapiens
gcctataatatcaaa

SEQ ID NO: 1889721 - DNA, 15 bp, Homo sapiens
cctataatatcaaag

SEQ ID NO: 1889722 - DNA, 15 bp, Homo sapiens
ctataatatcaaagt

SEQ ID NO: 1889723 - DNA, 15 bp, Homo sapiens
tataatatcaaagta

SEQ ID NO: 1889724 - DNA, 15 bp, Homo sapiens
ataatatcaaagtaa

SEQ ID NO: 1889725 - DNA, 15 bp, Homo sapiens
taatatcaaagtaaa

SEQ ID NO: 1889726 - DNA, 15 bp, Homo sapiens
aatatcaaagtaaag

SEQ ID NO: 1889727 - DNA, 15 bp, Homo sapiens
atatcaaagtaaagc

SEQ ID NO: 1889728 - DNA, 15 bp, Homo sapiens
tatcaaagtaaagcc

SEQ ID NO: 1889729 - DNA, 15 bp, Homo sapiens
atcaaagtaaagcca

SEQ ID NO: 1889730 - DNA, 15 bp, Homo sapiens
tcaaagtaaagccat

SEQ ID NO: 1889731 - DNA, 15 bp, Homo sapiens
caaagtaaagccatg

SEQ ID NO: 1889732 - DNA, 15 bp, Homo sapiens
aaagtaaagccatgt

SEQ ID NO: 1889733 - DNA, 15 bp, Homo sapiens
aagtaaagccatgta

SEQ ID NO: 1889734 - DNA, 15 bp, Homo sapiens
agtaaagccatgtag

SEQ ID NO: 1889735 - DNA, 15 bp, Homo sapiens
gtaaagccatgtaga

SEQ ID NO: 1889736 - DNA, 15 bp, Homo sapiens
taaagccatgtagat

SEQ ID NO: 1889737 - DNA, 15 bp, Homo sapiens
aaagccatgtagatg

SEQ ID NO: 1889738 - DNA, 15 bp, Homo sapiens
aagccatgtagatgt

SEQ ID NO: 1889739 - DNA, 15 bp, Homo sapiens
agccatgtagatgtg

SEQ ID NO: 1889740 - DNA, 15 bp, Homo sapiens
gccatgtagatgtga

SEQ ID NO: 1889741 - DNA, 15 bp, Homo sapiens
ccatgtagatgtgat

SEQ ID NO: 1889742 - DNA, 15 bp, Homo sapiens
catgtagatgtgatg

SEQ ID NO: 1889743 - DNA, 15 bp, Homo sapiens
atgtagatgtgatgt

SEQ ID NO: 1889744 - DNA, 15 bp, Homo sapiens
tgtagatgtgatgtt

SEQ ID NO: 1889745 - DNA, 15 bp, Homo sapiens
gtagatgtgatgtta

SEQ ID NO: 1889746 - DNA, 15 bp, Homo sapiens
tagatgtgatgttat

SEQ ID NO: 1889747 - DNA, 15 bp, Homo sapiens
agatgtgatgttatg

SEQ ID NO: 1889748 - DNA, 15 bp, Homo sapiens
gatgtgatgttatga

SEQ ID NO: 1889749 - DNA, 15 bp, Homo sapiens
atgtgatgttatgag

SEQ ID NO: 1889750 - DNA, 15 bp, Homo sapiens
tgtgatgttatgaga

SEQ ID NO: 1889751 - DNA, 15 bp, Homo sapiens
gtgatgttatgagag

SEQ ID NO: 1889752 - DNA, 15 bp, Homo sapiens
tgatgttatgagaga

SEQ ID NO: 1889753 - DNA, 15 bp, Homo sapiens
gatgttatgagagaa

SEQ ID NO: 1889754 - DNA, 15 bp, Homo sapiens
atgttatgagagaaa

SEQ ID NO: 1889755 - DNA, 15 bp, Homo sapiens
tgttatgagagaaaa

SEQ ID NO: 1889756 - DNA, 15 bp, Homo sapiens
gttatgagagaaaag

SEQ ID NO: 1889757 - DNA, 15 bp, Homo sapiens
ttatgagagaaaagt

SEQ ID NO: 1889758 - DNA, 15 bp, Homo sapiens
tatgagagaaaagtg

SEQ ID NO: 1889759 - DNA, 15 bp, Homo sapiens
atgagagaaaagtga

SEQ ID NO: 1889760 - DNA, 15 bp, Homo sapiens
tgagagaaaagtgat

SEQ ID NO: 1889761 - DNA, 15 bp, Homo sapiens
gagagaaaagtgatc

SEQ ID NO: 1889762 - DNA, 15 bp, Homo sapiens
agagaaaagtgatcg

SEQ ID NO: 1889763 - DNA, 15 bp, Homo sapiens
gagaaaagtgatcga

SEQ ID NO: 1889764 - DNA, 15 bp, Homo sapiens
agaaaagtgatcgac

SEQ ID NO: 1889765 - DNA, 15 bp, Homo sapiens
gaaaagtgatcgact

SEQ ID NO: 1889766 - DNA, 15 bp, Homo sapiens
aaaagtgatcgactg

SEQ ID NO: 1889767 - DNA, 15 bp, Homo sapiens
aaagtgatcgactga

SEQ ID NO: 1889768 - DNA, 15 bp, Homo sapiens
aagtgatcgactgag

SEQ ID NO: 1889769 - DNA, 15 bp, Homo sapiens
agtgatcgactgaga

SEQ ID NO: 1889770 - DNA, 15 bp, Homo sapiens
gtgatcgactgagaa

SEQ ID NO: 1889771 - DNA, 15 bp, Homo sapiens
tgatcgactgagaac

SEQ ID NO: 1889772 - DNA, 15 bp, Homo sapiens
gatcgactgagaaca

SEQ ID NO: 1889773 - DNA, 15 bp, Homo sapiens
atcgactgagaacaa

SEQ ID NO: 1889774 - DNA, 15 bp, Homo sapiens
tcgactgagaacaac

SEQ ID NO: 1889775 - DNA, 15 bp, Homo sapiens
cgactgagaacaact

SEQ ID NO: 1889776 - DNA, 15 bp, Homo sapiens
gactgagaacaactt

SEQ ID NO: 1889777 - DNA, 15 bp, Homo sapiens
actgagaacaacttc

SEQ ID NO: 1889778 - DNA, 15 bp, Homo sapiens
ctgagaacaacttca

SEQ ID NO: 1889779 - DNA, 15 bp, Homo sapiens
tgagaacaacttcat

SEQ ID NO: 1889780 - DNA, 15 bp, Homo sapiens
gagaacaacttcatt

SEQ ID NO: 1889781 - DNA, 15 bp, Homo sapiens
agaacaacttcatta

SEQ ID NO: 1889782 - DNA, 15 bp, Homo sapiens
gaacaacttcattaa

SEQ ID NO: 1889783 - DNA, 15 bp, Homo sapiens
aacaacttcattaaa

SEQ ID NO: 1889784 - DNA, 15 bp, Homo sapiens
acaacttcattaaat

SEQ ID NO: 1889785 - DNA, 15 bp, Homo sapiens
caacttcattaaata

SEQ ID NO: 1889786 - DNA, 15 bp, Homo sapiens
aacttcattaaatat

SEQ ID NO: 1889787 - DNA, 15 bp, Homo sapiens
acttcattaaatatg

SEQ ID NO: 1889788 - DNA, 15 bp, Homo sapiens
cttcattaaatatga

SEQ ID NO: 1889789 - DNA, 15 bp, Homo sapiens
ttcattaaatatgat

SEQ ID NO: 1889790 - DNA, 15 bp, Homo sapiens
tcattaaatatgatg

SEQ ID NO: 1889791 - DNA, 15 bp, Homo sapiens
cattaaatatgatgt

SEQ ID NO: 1889792 - DNA, 15 bp, Homo sapiens
attaaatatgatgtg

SEQ ID NO: 1889793 - DNA, 15 bp, Homo sapiens
ttaaatatgatgtga

SEQ ID NO: 1889794 - DNA, 15 bp, Homo sapiens
taaatatgatgtgaa

SEQ ID NO: 1889795 - DNA, 15 bp, Homo sapiens
aaatatgatgtgaat

SEQ ID NO: 1889796 - DNA, 15 bp, Homo sapiens
aatatgatgtgaatt

SEQ ID NO: 1889797 - DNA, 15 bp, Homo sapiens
atatgatgtgaattc

SEQ ID NO: 1889798 - DNA, 15 bp, Homo sapiens
tatgatgtgaattct

SEQ ID NO: 1889799 - DNA, 15 bp, Homo sapiens
atgatgtgaattcta

SEQ ID NO: 1889800 - DNA, 15 bp, Homo sapiens
tgatgtgaattctac

SEQ ID NO: 1889801 - DNA, 15 bp, Homo sapiens
gatgtgaattctaca

SEQ ID NO: 1889802 - DNA, 15 bp, Homo sapiens
atgtgaattctacaa

SEQ ID NO: 1889803 - DNA, 15 bp, Homo sapiens
tgtgaattctacaag

SEQ ID NO: 1889804 - DNA, 15 bp, Homo sapiens
gtgaattctacaagt

SEQ ID NO: 1889805 - DNA, 15 bp, Homo sapiens
tgaattctacaagta

SEQ ID NO: 1889806 - DNA, 15 bp, Homo sapiens
gaattctacaagtaa

SEQ ID NO: 1889807 - DNA, 15 bp, Homo sapiens
aattctacaagtaaa

SEQ ID NO: 1889808 - DNA, 15 bp, Homo sapiens
attctacaagtaaag

SEQ ID NO: 1889809 - DNA, 15 bp, Homo sapiens
ttctacaagtaaagg

SEQ ID NO: 1889810 - DNA, 15 bp, Homo sapiens
tctacaagtaaagga

SEQ ID NO: 1889811 - DNA, 15 bp, Homo sapiens
ctacaagtaaaggaa

SEQ ID NO: 1889812 - DNA, 15 bp, Homo sapiens
tacaagtaaaggaaa

SEQ ID NO: 1889813 - DNA, 15 bp, Homo sapiens
acaagtaaaggaaag

SEQ ID NO: 1889814 - DNA, 15 bp, Homo sapiens
caagtaaaggaaagc

SEQ ID NO: 1889815 - DNA, 15 bp, Homo sapiens
aagtaaaggaaagcc

SEQ ID NO: 1889816 - DNA, 15 bp, Homo sapiens
agtaaaggaaagcca

SEQ ID NO: 1889817 - DNA, 15 bp, Homo sapiens
gtaaaggaaagccag

SEQ ID NO: 1889818 - DNA, 15 bp, Homo sapiens
taaaggaaagccagg

SEQ ID NO: 1889819 - DNA, 15 bp, Homo sapiens
aaaggaaagccagga

SEQ ID NO: 1889820 - DNA, 15 bp, Homo sapiens
aaggaaagccaggat

SEQ ID NO: 1889821 - DNA, 15 bp, Homo sapiens
aggaaagccaggata

SEQ ID NO: 1889822 - DNA, 15 bp, Homo sapiens
ggaaagccaggataa

SEQ ID NO: 1889823 - DNA, 15 bp, Homo sapiens
gaaagccaggataaa

SEQ ID NO: 1889824 - DNA, 15 bp, Homo sapiens
aaagccaggataaaa

SEQ ID NO: 1889825 - DNA, 15 bp, Homo sapiens
aagccaggataaaaa

SEQ ID NO: 1889826 - DNA, 15 bp, Homo sapiens
agccaggataaaaac

SEQ ID NO: 1889827 - DNA, 15 bp, Homo sapiens
gccaggataaaaacg

SEQ ID NO: 1889828 - DNA, 15 bp, Homo sapiens
ccaggataaaaacgg

SEQ ID NO: 1889829 - DNA, 15 bp, Homo sapiens
caggataaaaacgga

SEQ ID NO: 1889830 - DNA, 15 bp, Homo sapiens
aggataaaaacggag

SEQ ID NO: 1889831 - DNA, 15 bp, Homo sapiens
ggataaaaacggagg

SEQ ID NO: 1889832 - DNA, 15 bp, Homo sapiens
gataaaaacggaggt

SEQ ID NO: 1889833 - DNA, 15 bp, Homo sapiens
ataaaaacggaggtg

SEQ ID NO: 1889834 - DNA, 15 bp, Homo sapiens
taaaaacggaggtgg

SEQ ID NO: 1889835 - DNA, 15 bp, Homo sapiens
aaaaacggaggtggt

SEQ ID NO: 1889836 - DNA, 15 bp, Homo sapiens
aaaacggaggtggtc

SEQ ID NO: 1889837 - DNA, 15 bp, Homo sapiens
aaacggaggtggtct

SEQ ID NO: 1889838 - DNA, 15 bp, Homo sapiens
aacggaggtggtctc

SEQ ID NO: 1889839 - DNA, 15 bp, Homo sapiens
acggaggtggtctca

SEQ ID NO: 1889840 - DNA, 15 bp, Homo sapiens
cggaggtggtctcac

SEQ ID NO: 1889841 - DNA, 15 bp, Homo sapiens
ggaggtggtctcact

SEQ ID NO: 1889842 - DNA, 15 bp, Homo sapiens
gaggtggtctcactc

SEQ ID NO: 1889843 - DNA, 15 bp, Homo sapiens
aggtggtctcactcc

SEQ ID NO: 1889844 - DNA, 15 bp, Homo sapiens
ggtggtctcactcca

SEQ ID NO: 1889845 - DNA, 15 bp, Homo sapiens
gtggtctcactccag

SEQ ID NO: 1889846 - DNA, 15 bp, Homo sapiens
tggtctcactccaga

SEQ ID NO: 1889847 - DNA, 15 bp, Homo sapiens
ggtctcactccagac

SEQ ID NO: 1889848 - DNA, 15 bp, Homo sapiens
gtctcactccagacc

SEQ ID NO: 1889849 - DNA, 15 bp, Homo sapiens
tctcactccagaccc

SEQ ID NO: 1889850 - DNA, 15 bp, Homo sapiens
ctcactccagaccca

SEQ ID NO: 1889851 - DNA, 15 bp, Homo sapiens
tcactccagacccat

SEQ ID NO: 1889852 - DNA, 15 bp, Homo sapiens
cactccagacccatg

SEQ ID NO: 1889853 - DNA, 15 bp, Homo sapiens
actccagacccatgc

SEQ ID NO: 1889854 - DNA, 15 bp, Homo sapiens
ctccagacccatgct

SEQ ID NO: 1889855 - DNA, 15 bp, Homo sapiens
tccagacccatgctt

SEQ ID NO: 1889856 - DNA, 15 bp, Homo sapiens
ccagacccatgcttt

SEQ ID NO: 1889857 - DNA, 15 bp, Homo sapiens
cagacccatgctttt

SEQ ID NO: 1889858 - DNA, 15 bp, Homo sapiens
tctgtcaccaagatg

SEQ ID NO: 1889859 - DNA, 15 bp, Homo sapiens
ctgtcaccaagatgg

SEQ ID NO: 1889860 - DNA, 15 bp, Homo sapiens
tgtcaccaagatggt

SEQ ID NO: 1889861 - DNA, 15 bp, Homo sapiens
gtcaccaagatggtt

SEQ ID NO: 1889862 - DNA, 15 bp, Homo sapiens
tcaccaagatggttt

SEQ ID NO: 1889863 - DNA, 15 bp, Homo sapiens
caccaagatggtttc

SEQ ID NO: 1889864 - DNA, 15 bp, Homo sapiens
accaagatggtttca

SEQ ID NO: 1889865 - DNA, 15 bp, Homo sapiens
ccaagatggtttcag

SEQ ID NO: 1889866 - DNA, 15 bp, Homo sapiens
caagatggtttcagt

SEQ ID NO: 1889867 - DNA, 15 bp, Homo sapiens
aagatggtttcagtc

SEQ ID NO: 1889868 - DNA, 15 bp, Homo sapiens
agatggtttcagtct

SEQ ID NO: 1889869 - DNA, 15 bp, Homo sapiens
gatggtttcagtcta

SEQ ID NO: 1889870 - DNA, 15 bp, Homo sapiens
atggtttcagtctag

SEQ ID NO: 1889871 - DNA, 15 bp, Homo sapiens
tggtttcagtctagt

SEQ ID NO: 1889872 - DNA, 15 bp, Homo sapiens
ggtttcagtctagta

SEQ ID NO: 1889873 - DNA, 15 bp, Homo sapiens
gtttcagtctagtag

SEQ ID NO: 1889874 - DNA, 15 bp, Homo sapiens
tttcagtctagtaga

SEQ ID NO: 1889875 - DNA, 15 bp, Homo sapiens
ttcagtctagtagag

SEQ ID NO: 1889876 - DNA, 15 bp, Homo sapiens
tcagtctagtagaga

SEQ ID NO: 1889877 - DNA, 15 bp, Homo sapiens
cagtctagtagagaa

SEQ ID NO: 1889878 - DNA, 15 bp, Homo sapiens
agtctagtagagaaa

SEQ ID NO: 1889879 - DNA, 15 bp, Homo sapiens
gtctagtagagaaag

SEQ ID NO: 1889880 - DNA, 15 bp, Homo sapiens
tctagtagagaaaga

SEQ ID NO: 1889881 - DNA, 15 bp, Homo sapiens
ctagtagagaaagat

SEQ ID NO: 1889882 - DNA, 15 bp, Homo sapiens
tagtagagaaagatg

SEQ ID NO: 1889883 - DNA, 15 bp, Homo sapiens
agtagagaaagatgt

SEQ ID NO: 1889884 - DNA, 15 bp, Homo sapiens
gtagagaaagatgtt

SEQ ID NO: 1889885 - DNA, 15 bp, Homo sapiens
tagagaaagatgtta

SEQ ID NO: 1889886 - DNA, 15 bp, Homo sapiens
agagaaagatgttaa

SEQ ID NO: 1889887 - DNA, 15 bp, Homo sapiens
gagaaagatgttaaa

SEQ ID NO: 1889888 - DNA, 15 bp, Homo sapiens
agaaagatgttaaaa

SEQ ID NO: 1889889 - DNA, 15 bp, Homo sapiens
gaaagatgttaaaaa

SEQ ID NO: 1889890 - DNA, 15 bp, Homo sapiens
aaagatgttaaaaaa

SEQ ID NO: 1889891 - DNA, 15 bp, Homo sapiens
aagatgttaaaaaac

SEQ ID NO: 1889892 - DNA, 15 bp, Homo sapiens
agatgttaaaaaaca

SEQ ID NO: 1889893 - DNA, 15 bp, Homo sapiens
gatgttaaaaaacaa

SEQ ID NO: 1889894 - DNA, 15 bp, Homo sapiens
atgttaaaaaacaaa

SEQ ID NO: 1889895 - DNA, 15 bp, Homo sapiens
tgttaaaaaacaaaa

SEQ ID NO: 1889896 - DNA, 15 bp, Homo sapiens
gttaaaaaacaaaaa

SEQ ID NO: 1889897 - DNA, 15 bp, Homo sapiens
ttaaaaaacaaaaat

SEQ ID NO: 1889898 - DNA, 15 bp, Homo sapiens
taaaaaacaaaaata

SEQ ID NO: 1889899 - DNA, 15 bp, Homo sapiens
aaaaaacaaaaatac

SEQ ID NO: 1889900 - DNA, 15 bp, Homo sapiens
aaaaacaaaaataca

SEQ ID NO: 1889901 - DNA, 15 bp, Homo sapiens
aaaacaaaaatacaa

SEQ ID NO: 1889902 - DNA, 15 bp, Homo sapiens
aaacaaaaatacaaa

SEQ ID NO: 1889903 - DNA, 15 bp, Homo sapiens
aaatacaaaaaaaca

SEQ ID NO: 1889904 - DNA, 15 bp, Homo sapiens
aatacaaaaaaacag

SEQ ID NO: 1889905 - DNA, 15 bp, Homo sapiens
atacaaaaaaacagg

SEQ ID NO: 1889906 - DNA, 15 bp, Homo sapiens
tacaaaaaaacaggc

SEQ ID NO: 1889907 - DNA, 15 bp, Homo sapiens
acaaaaaaacaggcg

SEQ ID NO: 1889908 - DNA, 15 bp, Homo sapiens
caaaaaaacaggcga

SEQ ID NO: 1889909 - DNA, 15 bp, Homo sapiens
aaaaaaacaggcgaa

SEQ ID NO: 1889910 - DNA, 15 bp, Homo sapiens
aaaaaacaggcgaag

SEQ ID NO: 1889911 - DNA, 15 bp, Homo sapiens
aaaaacaggcgaagc

SEQ ID NO: 1889912 - DNA, 15 bp, Homo sapiens
aaaacaggcgaagcg

SEQ ID NO: 1889913 - DNA, 15 bp, Homo sapiens
aaacaggcgaagcga

SEQ ID NO: 1889914 - DNA, 15 bp, Homo sapiens
aacaggcgaagcgag

SEQ ID NO: 1889915 - DNA, 15 bp, Homo sapiens
acaggcgaagcgaga

SEQ ID NO: 1889916 - DNA, 15 bp, Homo sapiens
caggcgaagcgagat

SEQ ID NO: 1889917 - DNA, 15 bp, Homo sapiens
aggcgaagcgagatg

SEQ ID NO: 1889918 - DNA, 15 bp, Homo sapiens
ggcgaagcgagatga

SEQ ID NO: 1889919 - DNA, 15 bp, Homo sapiens
gcgaagcgagatgaa

SEQ ID NO: 1889920 - DNA, 15 bp, Homo sapiens
cgaagcgagatgaat

SEQ ID NO: 1889921 - DNA, 15 bp, Homo sapiens
gaagcgagatgaatc

SEQ ID NO: 1889922 - DNA, 15 bp, Homo sapiens
aagcgagatgaatca

SEQ ID NO: 1889923 - DNA, 15 bp, Homo sapiens
agcgagatgaatcag

SEQ ID NO: 1889924 - DNA, 15 bp, Homo sapiens
gcgagatgaatcagt

SEQ ID NO: 1889925 - DNA, 15 bp, Homo sapiens
cgagatgaatcagtg

SEQ ID NO: 1889926 - DNA, 15 bp, Homo sapiens
gagatgaatcagtgc

SEQ ID NO: 1889927 - DNA, 15 bp, Homo sapiens
agatgaatcagtgct

SEQ ID NO: 1889928 - DNA, 15 bp, Homo sapiens
gatgaatcagtgctc

SEQ ID NO: 1889929 - DNA, 15 bp, Homo sapiens
atgaatcagtgctca

SEQ ID NO: 1889930 - DNA, 15 bp, Homo sapiens
tgaatcagtgctcag

SEQ ID NO: 1889931 - DNA, 15 bp, Homo sapiens
gaatcagtgctcagt

SEQ ID NO: 1889932 - DNA, 15 bp, Homo sapiens
aatcagtgctcagtg

SEQ ID NO: 1889933 - DNA, 15 bp, Homo sapiens
atcagtgctcagtga

SEQ ID NO: 1889934 - DNA, 15 bp, Homo sapiens
tcagtgctcagtgag

SEQ ID NO: 1889935 - DNA, 15 bp, Homo sapiens
cagtgctcagtgagt

SEQ ID NO: 1889936 - DNA, 15 bp, Homo sapiens
agtgctcagtgagtc

SEQ ID NO: 1889937 - DNA, 15 bp, Homo sapiens
gtgctcagtgagtct

SEQ ID NO: 1889938 - DNA, 15 bp, Homo sapiens
tgctcagtgagtctg

SEQ ID NO: 1889939 - DNA, 15 bp, Homo sapiens
gctcagtgagtctgt

SEQ ID NO: 1889940 - DNA, 15 bp, Homo sapiens
ctcagtgagtctgtt

SEQ ID NO: 1889941 - DNA, 15 bp, Homo sapiens
tcagtgagtctgttt

SEQ ID NO: 1889942 - DNA, 15 bp, Homo sapiens
cagtgagtctgtttg

SEQ ID NO: 1889943 - DNA, 15 bp, Homo sapiens
agtgagtctgtttga

SEQ ID NO: 1889944 - DNA, 15 bp, Homo sapiens
gtgagtctgtttgaa

SEQ ID NO: 1889945 - DNA, 15 bp, Homo sapiens
tgagtctgtttgaaa

SEQ ID NO: 1889946 - DNA, 15 bp, Homo sapiens
gagtctgtttgaaac

SEQ ID NO: 1889947 - DNA, 15 bp, Homo sapiens
agtctgtttgaaaca

SEQ ID NO: 1889948 - DNA, 15 bp, Homo sapiens
gtctgtttgaaacaa

SEQ ID NO: 1889949 - DNA, 15 bp, Homo sapiens
tctgtttgaaacaag

SEQ ID NO: 1889950 - DNA, 15 bp, Homo sapiens
ctgtttgaaacaagc

SEQ ID NO: 1889951 - DNA, 15 bp, Homo sapiens
tgtttgaaacaagct

SEQ ID NO: 1889952 - DNA, 15 bp, Homo sapiens
gtttgaaacaagctg

SEQ ID NO: 1889953 - DNA, 15 bp, Homo sapiens
tttgaaacaagctgt

SEQ ID NO: 1889954 - DNA, 15 bp, Homo sapiens
ttgaaacaagctgtg

SEQ ID NO: 1889955 - DNA, 15 bp, Homo sapiens
tgaaacaagctgtgg

SEQ ID NO: 1889956 - DNA, 15 bp, Homo sapiens
gaaacaagctgtggg

SEQ ID NO: 1889957 - DNA, 15 bp, Homo sapiens
aaacaagctgtgggg

SEQ ID NO: 1889958 - DNA, 15 bp, Homo sapiens
aacaagctgtgggga

SEQ ID NO: 1889959 - DNA, 15 bp, Homo sapiens
acaagctgtggggag

SEQ ID NO: 1889960 - DNA, 15 bp, Homo sapiens
caagctgtggggagt

SEQ ID NO: 1889961 - DNA, 15 bp, Homo sapiens
aagctgtggggagtg

SEQ ID NO: 1889962 - DNA, 15 bp, Homo sapiens
agctgtggggagtgc

SEQ ID NO: 1889963 - DNA, 15 bp, Homo sapiens
gctgtggggagtgca

SEQ ID NO: 1889964 - DNA, 15 bp, Homo sapiens
ctgtggggagtgcag

SEQ ID NO: 1889965 - DNA, 15 bp, Homo sapiens
tgtggggagtgcaga

SEQ ID NO: 1889966 - DNA, 15 bp, Homo sapiens
gtggggagtgcagag

SEQ ID NO: 1889967 - DNA, 15 bp, Homo sapiens
tggggagtgcagaga

SEQ ID NO: 1889968 - DNA, 15 bp, Homo sapiens
ggggagtgcagagaa

SEQ ID NO: 1889969 - DNA, 15 bp, Homo sapiens
gggagtgcagagaaa

SEQ ID NO: 1889970 - DNA, 15 bp, Homo sapiens
ggagtgcagagaaag

SEQ ID NO: 1889971 - DNA, 15 bp, Homo sapiens
gagtgcagagaaaga

SEQ ID NO: 1889972 - DNA, 15 bp, Homo sapiens
agtgcagagaaagaa

SEQ ID NO: 1889973 - DNA, 15 bp, Homo sapiens
gtgcagagaaagaaa

SEQ ID NO: 1889974 - DNA, 15 bp, Homo sapiens
tgcagagaaagaaag

SEQ ID NO: 1889975 - DNA, 15 bp, Homo sapiens
gcagagaaagaaagc

SEQ ID NO: 1889976 - DNA, 15 bp, Homo sapiens
cagagaaagaaagcc

SEQ ID NO: 1889977 - DNA, 15 bp, Homo sapiens
agagaaagaaagccc

SEQ ID NO: 1889978 - DNA, 15 bp, Homo sapiens
gagaaagaaagccct

SEQ ID NO: 1889979 - DNA, 15 bp, Homo sapiens
agaaagaaagccctt

SEQ ID NO: 1889980 - DNA, 15 bp, Homo sapiens
gaaagaaagcccttg

SEQ ID NO: 1889981 - DNA, 15 bp, Homo sapiens
aaagaaagcccttga

SEQ ID NO: 1889982 - DNA, 15 bp, Homo sapiens
aagaaagcccttgag

SEQ ID NO: 1889983 - DNA, 15 bp, Homo sapiens
agaaagcccttgaga

SEQ ID NO: 1889984 - DNA, 15 bp, Homo sapiens
gaaagcccttgagag

SEQ ID NO: 1889985 - DNA, 15 bp, Homo sapiens
aaagcccttgagagc

SEQ ID NO: 1889986 - DNA, 15 bp, Homo sapiens
aagcccttgagagca

SEQ ID NO: 1889987 - DNA, 15 bp, Homo sapiens
agcccttgagagcaa

SEQ ID NO: 1889988 - DNA, 15 bp, Homo sapiens
gcccttgagagcaaa

SEQ ID NO: 1889989 - DNA, 15 bp, Homo sapiens
cccttgagagcaaac

SEQ ID NO: 1889990 - DNA, 15 bp, Homo sapiens
ccttgagagcaaact

SEQ ID NO: 1889991 - DNA, 15 bp, Homo sapiens
cttgagagcaaactc

SEQ ID NO: 1889992 - DNA, 15 bp, Homo sapiens
ttgagagcaaactca

SEQ ID NO: 1889993 - DNA, 15 bp, Homo sapiens
tgagagcaaactcat

SEQ ID NO: 1889994 - DNA, 15 bp, Homo sapiens
gagagcaaactcatg

SEQ ID NO: 1889995 - DNA, 15 bp, Homo sapiens
agagcaaactcatgc

SEQ ID NO: 1889996 - DNA, 15 bp, Homo sapiens
gagcaaactcatgcc

SEQ ID NO: 1889997 - DNA, 15 bp, Homo sapiens
agcaaactcatgccc

SEQ ID NO: 1889998 - DNA, 15 bp, Homo sapiens
gcaaactcatgcccc

SEQ ID NO: 1889999 - DNA, 15 bp, Homo sapiens
caaactcatgccccc

SEQ ID NO: 1890000 - DNA, 15 bp, Homo sapiens
aaactcatgcccccc

SEQ ID NO: 1890001 - DNA, 15 bp, Homo sapiens
aactcatgcccccct

SEQ ID NO: 1890002 - DNA, 15 bp, Homo sapiens
actcatgccccccta

SEQ ID NO: 1890003 - DNA, 15 bp, Homo sapiens
ctcatgcccccctac

SEQ ID NO: 1890004 - DNA, 15 bp, Homo sapiens
tcatgcccccctact

SEQ ID NO: 1890005 - DNA, 15 bp, Homo sapiens
catgcccccctactt

SEQ ID NO: 1890006 - DNA, 15 bp, Homo sapiens
atgcccccctacttt

SEQ ID NO: 1890007 - DNA, 15 bp, Homo sapiens
tgcccccctactttc

SEQ ID NO: 1890008 - DNA, 15 bp, Homo sapiens
gcccccctactttca

SEQ ID NO: 1890009 - DNA, 15 bp, Homo sapiens
cccccctactttcat

SEQ ID NO: 1890010 - DNA, 15 bp, Homo sapiens
ccccctactttcatc

SEQ ID NO: 1890011 - DNA, 15 bp, Homo sapiens
cccctactttcatct

SEQ ID NO: 1890012 - DNA, 15 bp, Homo sapiens
ccctactttcatctc

SEQ ID NO: 1890013 - DNA, 15 bp, Homo sapiens
cctactttcatctca

SEQ ID NO: 1890014 - DNA, 15 bp, Homo sapiens
ctactttcatctcaa

SEQ ID NO: 1890015 - DNA, 15 bp, Homo sapiens
tactttcatctcaac

SEQ ID NO: 1890016 - DNA, 15 bp, Homo sapiens
actttcatctcaacc

SEQ ID NO: 1890017 - DNA, 15 bp, Homo sapiens
ctttcatctcaacct

SEQ ID NO: 1890018 - DNA, 15 bp, Homo sapiens
tttcatctcaacctc

SEQ ID NO: 1890019 - DNA, 15 bp, Homo sapiens
ttcatctcaacctct

SEQ ID NO: 1890020 - DNA, 15 bp, Homo sapiens
tcatctcaacctctg

SEQ ID NO: 1890021 - DNA, 15 bp, Homo sapiens
catctcaacctctgt

SEQ ID NO: 1890022 - DNA, 15 bp, Homo sapiens
atctcaacctctgtg

SEQ ID NO: 1890023 - DNA, 15 bp, Homo sapiens
tctcaacctctgtgt

SEQ ID NO: 1890024 - DNA, 15 bp, Homo sapiens
ctcaacctctgtgta

SEQ ID NO: 1890025 - DNA, 15 bp, Homo sapiens
tcaacctctgtgtac

SEQ ID NO: 1890026 - DNA, 15 bp, Homo sapiens
caacctctgtgtact

SEQ ID NO: 1890027 - DNA, 15 bp, Homo sapiens
aacctctgtgtacta

SEQ ID NO: 1890028 - DNA, 15 bp, Homo sapiens
acctctgtgtactag

SEQ ID NO: 1890029 - DNA, 15 bp, Homo sapiens
cctctgtgtactagg

SEQ ID NO: 1890030 - DNA, 15 bp, Homo sapiens
ctctgtgtactaggg

SEQ ID NO: 1890031 - DNA, 15 bp, Homo sapiens
tctgtgtactagggt

SEQ ID NO: 1890032 - DNA, 15 bp, Homo sapiens
ctgtgtactagggta

SEQ ID NO: 1890033 - DNA, 15 bp, Homo sapiens
tgtgtactagggtag

SEQ ID NO: 1890034 - DNA, 15 bp, Homo sapiens
gtgtactagggtagt

SEQ ID NO: 1890035 - DNA, 15 bp, Homo sapiens
tgtactagggtagtc

SEQ ID NO: 1890036 - DNA, 15 bp, Homo sapiens
gtactagggtagtca

SEQ ID NO: 1890037 - DNA, 15 bp, Homo sapiens
tactagggtagtcat

SEQ ID NO: 1890038 - DNA, 15 bp, Homo sapiens
actagggtagtcatt

SEQ ID NO: 1890039 - DNA, 15 bp, Homo sapiens
ctagggtagtcattg

SEQ ID NO: 1890040 - DNA, 15 bp, Homo sapiens
tagggtagtcattgg

SEQ ID NO: 1890041 - DNA, 15 bp, Homo sapiens
agggtagtcattggg

SEQ ID NO: 1890042 - DNA, 15 bp, Homo sapiens
gggtagtcattggga

SEQ ID NO: 1890043 - DNA, 15 bp, Homo sapiens
ggtagtcattgggaa

SEQ ID NO: 1890044 - DNA, 15 bp, Homo sapiens
gtagtcattgggaat

SEQ ID NO: 1890045 - DNA, 15 bp, Homo sapiens
tagtcattgggaata

SEQ ID NO: 1890046 - DNA, 15 bp, Homo sapiens
agtcattgggaatat

SEQ ID NO: 1890047 - DNA, 15 bp, Homo sapiens
gtcattgggaatatc

SEQ ID NO: 1890048 - DNA, 15 bp, Homo sapiens
tcattgggaatatct

SEQ ID NO: 1890049 - DNA, 15 bp, Homo sapiens
cattgggaatatctg

SEQ ID NO: 1890050 - DNA, 15 bp, Homo sapiens
attgggaatatctgt

SEQ ID NO: 1890051 - DNA, 15 bp, Homo sapiens
ttgggaatatctgtg

SEQ ID NO: 1890052 - DNA, 15 bp, Homo sapiens
tgggaatatctgtgg

SEQ ID NO: 1890053 - DNA, 15 bp, Homo sapiens
gggaatatctgtggt

SEQ ID NO: 1890054 - DNA, 15 bp, Homo sapiens
ggaatatctgtggtc

SEQ ID NO: 1890055 - DNA, 15 bp, Homo sapiens
gaatatctgtggtct

SEQ ID NO: 1890056 - DNA, 15 bp, Homo sapiens
aatatctgtggtctg

SEQ ID NO: 1890057 - DNA, 15 bp, Homo sapiens
atatctgtggtctgt

SEQ ID NO: 1890058 - DNA, 15 bp, Homo sapiens
tatctgtggtctgtg

SEQ ID NO: 1890059 - DNA, 15 bp, Homo sapiens
atctgtggtctgtga

SEQ ID NO: 1890060 - DNA, 15 bp, Homo sapiens
tctgtggtctgtgag

SEQ ID NO: 1890061 - DNA, 15 bp, Homo sapiens
ctgtggtctgtgagt

SEQ ID NO: 1890062 - DNA, 15 bp, Homo sapiens
tgtggtctgtgagtg

SEQ ID NO: 1890063 - DNA, 15 bp, Homo sapiens
gtggtctgtgagtga

SEQ ID NO: 1890064 - DNA, 15 bp, Homo sapiens
tggtctgtgagtgaa

SEQ ID NO: 1890065 - DNA, 15 bp, Homo sapiens
ggtctgtgagtgaat

SEQ ID NO: 1890066 - DNA, 15 bp, Homo sapiens
gtctgtgagtgaatt

SEQ ID NO: 1890067 - DNA, 15 bp, Homo sapiens
tctgtgagtgaattg

SEQ ID NO: 1890068 - DNA, 15 bp, Homo sapiens
ctgtgagtgaattga

SEQ ID NO: 1890069 - DNA, 15 bp, Homo sapiens
tgtgagtgaattgat

SEQ ID NO: 1890070 - DNA, 15 bp, Homo sapiens
gtgagtgaattgata

SEQ ID NO: 1890071 - DNA, 15 bp, Homo sapiens
tgagtgaattgatac

SEQ ID NO: 1890072 - DNA, 15 bp, Homo sapiens
gagtgaattgataca

SEQ ID NO: 1890073 - DNA, 15 bp, Homo sapiens
agtgaattgatacat

SEQ ID NO: 1890074 - DNA, 15 bp, Homo sapiens
gtgaattgatacata

SEQ ID NO: 1890075 - DNA, 15 bp, Homo sapiens
tgaattgatacataa

SEQ ID NO: 1890076 - DNA, 15 bp, Homo sapiens
gaattgatacataag

SEQ ID NO: 1890077 - DNA, 15 bp, Homo sapiens
aattgatacataaga

SEQ ID NO: 1890078 - DNA, 15 bp, Homo sapiens
attgatacataagat

SEQ ID NO: 1890079 - DNA, 15 bp, Homo sapiens
ttgatacataagatc

SEQ ID NO: 1890080 - DNA, 15 bp, Homo sapiens
tgatacataagatcc

SEQ ID NO: 1890081 - DNA, 15 bp, Homo sapiens
gatacataagatccc

SEQ ID NO: 1890082 - DNA, 15 bp, Homo sapiens
atacataagatccca

SEQ ID NO: 1890083 - DNA, 15 bp, Homo sapiens
tacataagatcccac

SEQ ID NO: 1890084 - DNA, 15 bp, Homo sapiens
acataagatcccact

SEQ ID NO: 1890085 - DNA, 15 bp, Homo sapiens
cataagatcccacta

SEQ ID NO: 1890086 - DNA, 15 bp, Homo sapiens
ataagatcccactac

SEQ ID NO: 1890087 - DNA, 15 bp, Homo sapiens
taagatcccactacg

SEQ ID NO: 1890088 - DNA, 15 bp, Homo sapiens
aagatcccactacga

SEQ ID NO: 1890089 - DNA, 15 bp, Homo sapiens
agatcccactacgac

SEQ ID NO: 1890090 - DNA, 15 bp, Homo sapiens
gatcccactacgaca

SEQ ID NO: 1890091 - DNA, 15 bp, Homo sapiens
atcccactacgacac

SEQ ID NO: 1890092 - DNA, 15 bp, Homo sapiens
tcccactacgacaca

SEQ ID NO: 1890093 - DNA, 15 bp, Homo sapiens
cccactacgacacag

SEQ ID NO: 1890094 - DNA, 15 bp, Homo sapiens
ccactacgacacagt

SEQ ID NO: 1890095 - DNA, 15 bp, Homo sapiens
cactacgacacagtg

SEQ ID NO: 1890096 - DNA, 15 bp, Homo sapiens
actacgacacagtgt

SEQ ID NO: 1890097 - DNA, 15 bp, Homo sapiens
ctacgacacagtgtt

SEQ ID NO: 1890098 - DNA, 15 bp, Homo sapiens
tacgacacagtgttc

SEQ ID NO: 1890099 - DNA, 15 bp, Homo sapiens
acgacacagtgttct

SEQ ID NO: 1890100 - DNA, 15 bp, Homo sapiens
cgacacagtgttctc

SEQ ID NO: 1890101 - DNA, 15 bp, Homo sapiens
gacacagtgttctca

SEQ ID NO: 1890102 - DNA, 15 bp, Homo sapiens
acacagtgttctcat

SEQ ID NO: 1890103 - DNA, 15 bp, Homo sapiens
cacagtgttctcatt

SEQ ID NO: 1890104 - DNA, 15 bp, Homo sapiens
acagtgttctcattt

SEQ ID NO: 1890105 - DNA, 15 bp, Homo sapiens
cagtgttctcatttg

SEQ ID NO: 1890106 - DNA, 15 bp, Homo sapiens
agtgttctcatttgt

SEQ ID NO: 1890107 - DNA, 15 bp, Homo sapiens
gtgttctcatttgtg

SEQ ID NO: 1890108 - DNA, 15 bp, Homo sapiens
tgttctcatttgtga

SEQ ID NO: 1890109 - DNA, 15 bp, Homo sapiens
gttctcatttgtgag

SEQ ID NO: 1890110 - DNA, 15 bp, Homo sapiens
ttctcatttgtgaga

SEQ ID NO: 1890111 - DNA, 15 bp, Homo sapiens
tctcatttgtgagat

SEQ ID NO: 1890112 - DNA, 15 bp, Homo sapiens
ctcatttgtgagatg

SEQ ID NO: 1890113 - DNA, 15 bp, Homo sapiens
tcatttgtgagatgg

SEQ ID NO: 1890114 - DNA, 15 bp, Homo sapiens
catttgtgagatggt

SEQ ID NO: 1890115 - DNA, 15 bp, Homo sapiens
atttgtgagatggtt

SEQ ID NO: 1890116 - DNA, 15 bp, Homo sapiens
tttgtgagatggttt

SEQ ID NO: 1890117 - DNA, 15 bp, Homo sapiens
ttgtgagatggtttg

SEQ ID NO: 1890118 - DNA, 15 bp, Homo sapiens
tgtgagatggtttgg

SEQ ID NO: 1890119 - DNA, 15 bp, Homo sapiens
gtgagatggtttggg

SEQ ID NO: 1890120 - DNA, 15 bp, Homo sapiens
tgagatggtttggga

SEQ ID NO: 1890121 - DNA, 15 bp, Homo sapiens
gagatggtttgggat

SEQ ID NO: 1890122 - DNA, 15 bp, Homo sapiens
agatggtttgggatt

SEQ ID NO: 1890123 - DNA, 15 bp, Homo sapiens
gatggtttgggattt

SEQ ID NO: 1890124 - DNA, 15 bp, Homo sapiens
atggtttgggattta

SEQ ID NO: 1890125 - DNA, 15 bp, Homo sapiens
tggtttgggatttat

SEQ ID NO: 1890126 - DNA, 15 bp, Homo sapiens
ggtttgggatttata

SEQ ID NO: 1890127 - DNA, 15 bp, Homo sapiens
gtttgggatttatat

SEQ ID NO: 1890128 - DNA, 15 bp, Homo sapiens
tttgggatttatata

SEQ ID NO: 1890129 - DNA, 15 bp, Homo sapiens
ttgggatttatatat

SEQ ID NO: 1890130 - DNA, 15 bp, Homo sapiens
tgggatttatatatc

SEQ ID NO: 1890131 - DNA, 15 bp, Homo sapiens
gggatttatatatct

SEQ ID NO: 1890132 - DNA, 15 bp, Homo sapiens
ggatttatatatcta

SEQ ID NO: 1890133 - DNA, 15 bp, Homo sapiens
gatttatatatctac

SEQ ID NO: 1890134 - DNA, 15 bp, Homo sapiens
atttatatatctact

SEQ ID NO: 1890135 - DNA, 15 bp, Homo sapiens
tttatatatctactt

SEQ ID NO: 1890136 - DNA, 15 bp, Homo sapiens
ttatatatctacttg

SEQ ID NO: 1890137 - DNA, 15 bp, Homo sapiens
tatatatctacttgc

SEQ ID NO: 1890138 - DNA, 15 bp, Homo sapiens
atatatctacttgct

SEQ ID NO: 1890139 - DNA, 15 bp, Homo sapiens
tatatctacttgctg

SEQ ID NO: 1890140 - DNA, 15 bp, Homo sapiens
atatctacttgctgc

SEQ ID NO: 1890141 - DNA, 15 bp, Homo sapiens
tatctacttgctgcc

SEQ ID NO: 1890142 - DNA, 15 bp, Homo sapiens
atctacttgctgcca

SEQ ID NO: 1890143 - DNA, 15 bp, Homo sapiens
tctacttgctgccac

SEQ ID NO: 1890144 - DNA, 15 bp, Homo sapiens
ctacttgctgccacc

SEQ ID NO: 1890145 - DNA, 15 bp, Homo sapiens
tacttgctgccacct

SEQ ID NO: 1890146 - DNA, 15 bp, Homo sapiens
acttgctgccacctt

SEQ ID NO: 1890147 - DNA, 15 bp, Homo sapiens
cttgctgccaccttt

SEQ ID NO: 1890148 - DNA, 15 bp, Homo sapiens
ttgctgccacctttg

SEQ ID NO: 1890149 - DNA, 15 bp, Homo sapiens
tgctgccacctttga

SEQ ID NO: 1890150 - DNA, 15 bp, Homo sapiens
gctgccacctttgaa

SEQ ID NO: 1890151 - DNA, 15 bp, Homo sapiens
ctgccacctttgaaa

SEQ ID NO: 1890152 - DNA, 15 bp, Homo sapiens
tgccacctttgaaaa

SEQ ID NO: 1890153 - DNA, 15 bp, Homo sapiens
gccacctttgaaaaa

SEQ ID NO: 1890154 - DNA, 15 bp, Homo sapiens
ccacctttgaaaaaa

SEQ ID NO: 1890155 - DNA, 15 bp, Homo sapiens
cacctttgaaaaaat

SEQ ID NO: 1890156 - DNA, 15 bp, Homo sapiens
acctttgaaaaaatt

SEQ ID NO: 1890157 - DNA, 15 bp, Homo sapiens
cctttgaaaaaattt

SEQ ID NO: 1890158 - DNA, 15 bp, Homo sapiens
ctttgaaaaaatttt

SEQ ID NO: 1890159 - DNA, 15 bp, Homo sapiens
tttgaaaaaatttta

SEQ ID NO: 1890160 - DNA, 15 bp, Homo sapiens
ttgaaaaaattttag

SEQ ID NO: 1890161 - DNA, 15 bp, Homo sapiens
tgaaaaaattttaga

SEQ ID NO: 1890162 - DNA, 15 bp, Homo sapiens
gaaaaaattttagat

SEQ ID NO: 1890163 - DNA, 15 bp, Homo sapiens
aaaaaattttagatt

SEQ ID NO: 1890164 - DNA, 15 bp, Homo sapiens
aaaaattttagattc

SEQ ID NO: 1890165 - DNA, 15 bp, Homo sapiens
aaaattttagattca

SEQ ID NO: 1890166 - DNA, 15 bp, Homo sapiens
aaattttagattcat

SEQ ID NO: 1890167 - DNA, 15 bp, Homo sapiens
aattttagattcata

SEQ ID NO: 1890168 - DNA, 15 bp, Homo sapiens
attttagattcatag

SEQ ID NO: 1890169 - DNA, 15 bp, Homo sapiens
ttttagattcataga

SEQ ID NO: 1890170 - DNA, 15 bp, Homo sapiens
tttagattcatagat

SEQ ID NO: 1890171 - DNA, 15 bp, Homo sapiens
ttagattcatagata

SEQ ID NO: 1890172 - DNA, 15 bp, Homo sapiens
tagattcatagatat

SEQ ID NO: 1890173 - DNA, 15 bp, Homo sapiens
agattcatagatatg

SEQ ID NO: 1890174 - DNA, 15 bp, Homo sapiens
gattcatagatatga

SEQ ID NO: 1890175 - DNA, 15 bp, Homo sapiens
attcatagatatgag

SEQ ID NO: 1890176 - DNA, 15 bp, Homo sapiens
ttcatagatatgaga

SEQ ID NO: 1890177 - DNA, 15 bp, Homo sapiens
tcatagatatgagaa

SEQ ID NO: 1890178 - DNA, 15 bp, Homo sapiens
catagatatgagaat

SEQ ID NO: 1890179 - DNA, 15 bp, Homo sapiens
atagatatgagaatt

SEQ ID NO: 1890180 - DNA, 15 bp, Homo sapiens
tagatatgagaattg

SEQ ID NO: 1890181 - DNA, 15 bp, Homo sapiens
agatatgagaattga

SEQ ID NO: 1890182 - DNA, 15 bp, Homo sapiens
gatatgagaattgac

SEQ ID NO: 1890183 - DNA, 15 bp, Homo sapiens
atatgagaattgacc

SEQ ID NO: 1890184 - DNA, 15 bp, Homo sapiens
tatgagaattgaccc

SEQ ID NO: 1890185 - DNA, 15 bp, Homo sapiens
atgagaattgaccct

SEQ ID NO: 1890186 - DNA, 15 bp, Homo sapiens
tgagaattgaccctc

SEQ ID NO: 1890187 - DNA, 15 bp, Homo sapiens
gagaattgaccctca

SEQ ID NO: 1890188 - DNA, 15 bp, Homo sapiens
agaattgaccctcag

SEQ ID NO: 1890189 - DNA, 15 bp, Homo sapiens
gaattgaccctcagt

SEQ ID NO: 1890190 - DNA, 15 bp, Homo sapiens
aattgaccctcagtt

SEQ ID NO: 1890191 - DNA, 15 bp, Homo sapiens
attgaccctcagttg

SEQ ID NO: 1890192 - DNA, 15 bp, Homo sapiens
ttgaccctcagttga

SEQ ID NO: 1890193 - DNA, 15 bp, Homo sapiens
tgaccctcagttgac

SEQ ID NO: 1890194 - DNA, 15 bp, Homo sapiens
gaccctcagttgacc

SEQ ID NO: 1890195 - DNA, 15 bp, Homo sapiens
accctcagttgacct

SEQ ID NO: 1890196 - DNA, 15 bp, Homo sapiens
ccctcagttgaccta

SEQ ID NO: 1890197 - DNA, 15 bp, Homo sapiens
cctcagttgacctat

SEQ ID NO: 1890198 - DNA, 15 bp, Homo sapiens
ctcagttgacctatc

SEQ ID NO: 1890199 - DNA, 15 bp, Homo sapiens
tcagttgacctatca

SEQ ID NO: 1890200 - DNA, 15 bp, Homo sapiens
cagttgacctatcat

SEQ ID NO: 1890201 - DNA, 15 bp, Homo sapiens
agttgacctatcatg

SEQ ID NO: 1890202 - DNA, 15 bp, Homo sapiens
gttgacctatcatgc

SEQ ID NO: 1890203 - DNA, 15 bp, Homo sapiens
ttgacctatcatgca

SEQ ID NO: 1890204 - DNA, 15 bp, Homo sapiens
tgacctatcatgcat

SEQ ID NO: 1890205 - DNA, 15 bp, Homo sapiens
gacctatcatgcata

SEQ ID NO: 1890206 - DNA, 15 bp, Homo sapiens
acctatcatgcataa

SEQ ID NO: 1890207 - DNA, 15 bp, Homo sapiens
cctatcatgcataag

SEQ ID NO: 1890208 - DNA, 15 bp, Homo sapiens
ctatcatgcataaga

SEQ ID NO: 1890209 - DNA, 15 bp, Homo sapiens
tatcatgcataagaa

SEQ ID NO: 1890210 - DNA, 15 bp, Homo sapiens
atcatgcataagaat

SEQ ID NO: 1890211 - DNA, 15 bp, Homo sapiens
tcatgcataagaata

SEQ ID NO: 1890212 - DNA, 15 bp, Homo sapiens
catgcataagaatag

SEQ ID NO: 1890213 - DNA, 15 bp, Homo sapiens
atgcataagaatagt

SEQ ID NO: 1890214 - DNA, 15 bp, Homo sapiens
tgcataagaatagta

SEQ ID NO: 1890215 - DNA, 15 bp, Homo sapiens
gcataagaatagtaa

SEQ ID NO: 1890216 - DNA, 15 bp, Homo sapiens
cataagaatagtaat

SEQ ID NO: 1890217 - DNA, 15 bp, Homo sapiens
ataagaatagtaatg

SEQ ID NO: 1890218 - DNA, 15 bp, Homo sapiens
taagaatagtaatga

SEQ ID NO: 1890219 - DNA, 15 bp, Homo sapiens
aagaatagtaatgat

SEQ ID NO: 1890220 - DNA, 15 bp, Homo sapiens
agaatagtaatgatc

SEQ ID NO: 1890221 - DNA, 15 bp, Homo sapiens
gaatagtaatgatcc

SEQ ID NO: 1890222 - DNA, 15 bp, Homo sapiens
aatagtaatgatcct

SEQ ID NO: 1890223 - DNA, 15 bp, Homo sapiens
atagtaatgatcctt

SEQ ID NO: 1890224 - DNA, 15 bp, Homo sapiens
tagtaatgatccttt

SEQ ID NO: 1890225 - DNA, 15 bp, Homo sapiens
agtaatgatcctttt

SEQ ID NO: 1890226 - DNA, 15 bp, Homo sapiens
gtaatgatcctttta

SEQ ID NO: 1890227 - DNA, 15 bp, Homo sapiens
taatgatccttttaa

SEQ ID NO: 1890228 - DNA, 15 bp, Homo sapiens
aatgatccttttaaa

SEQ ID NO: 1890229 - DNA, 15 bp, Homo sapiens
atgatccttttaaaa

SEQ ID NO: 1890230 - DNA, 15 bp, Homo sapiens
tgatccttttaaaac

SEQ ID NO: 1890231 - DNA, 15 bp, Homo sapiens
gatccttttaaaact

SEQ ID NO: 1890232 - DNA, 15 bp, Homo sapiens
atccttttaaaacta

SEQ ID NO: 1890233 - DNA, 15 bp, Homo sapiens
tccttttaaaactac

SEQ ID NO: 1890234 - DNA, 15 bp, Homo sapiens
ccttttaaaactacg

SEQ ID NO: 1890235 - DNA, 15 bp, Homo sapiens
cttttaaaactacgt

SEQ ID NO: 1890236 - DNA, 15 bp, Homo sapiens
ttttaaaactacgtc

SEQ ID NO: 1890237 - DNA, 15 bp, Homo sapiens
tttaaaactacgtct

SEQ ID NO: 1890238 - DNA, 15 bp, Homo sapiens
ttaaaactacgtctt

SEQ ID NO: 1890239 - DNA, 15 bp, Homo sapiens
taaaactacgtcttg

SEQ ID NO: 1890240 - DNA, 15 bp, Homo sapiens
aaaactacgtcttga

SEQ ID NO: 1890241 - DNA, 15 bp, Homo sapiens
aaactacgtcttgat

SEQ ID NO: 1890242 - DNA, 15 bp, Homo sapiens
aactacgtcttgatt

SEQ ID NO: 1890243 - DNA, 15 bp, Homo sapiens
actacgtcttgattg

SEQ ID NO: 1890244 - DNA, 15 bp, Homo sapiens
ctacgtcttgattgt

SEQ ID NO: 1890245 - DNA, 15 bp, Homo sapiens
tacgtcttgattgtt

SEQ ID NO: 1890246 - DNA, 15 bp, Homo sapiens
acgtcttgattgtta

SEQ ID NO: 1890247 - DNA, 15 bp, Homo sapiens
cgtcttgattgttat

SEQ ID NO: 1890248 - DNA, 15 bp, Homo sapiens
gtcttgattgttatt

SEQ ID NO: 1890249 - DNA, 15 bp, Homo sapiens
tcttgattgttatta

SEQ ID NO: 1890250 - DNA, 15 bp, Homo sapiens
cttgattgttattac

SEQ ID NO: 1890251 - DNA, 15 bp, Homo sapiens
ttgattgttattact

SEQ ID NO: 1890252 - DNA, 15 bp, Homo sapiens
tgattgttattactg

SEQ ID NO: 1890253 - DNA, 15 bp, Homo sapiens
gattgttattactgg

SEQ ID NO: 1890254 - DNA, 15 bp, Homo sapiens
attgttattactggg

SEQ ID NO: 1890255 - DNA, 15 bp, Homo sapiens
ttgttattactggga

SEQ ID NO: 1890256 - DNA, 15 bp, Homo sapiens
tgttattactgggag

SEQ ID NO: 1890257 - DNA, 15 bp, Homo sapiens
gttattactgggaga

SEQ ID NO: 1890258 - DNA, 15 bp, Homo sapiens
ttattactgggagat

SEQ ID NO: 1890259 - DNA, 15 bp, Homo sapiens
tattactgggagatg

SEQ ID NO: 1890260 - DNA, 15 bp, Homo sapiens
attactgggagatga

SEQ ID NO: 1890261 - DNA, 15 bp, Homo sapiens
ttactgggagatgaa

SEQ ID NO: 1890262 - DNA, 15 bp, Homo sapiens
tactgggagatgaac

SEQ ID NO: 1890263 - DNA, 15 bp, Homo sapiens
actgggagatgaaca

SEQ ID NO: 1890264 - DNA, 15 bp, Homo sapiens
ctgggagatgaacaa

SEQ ID NO: 1890265 - DNA, 15 bp, Homo sapiens
tgggagatgaacaaa

SEQ ID NO: 1890266 - DNA, 15 bp, Homo sapiens
gggagatgaacaaaa

SEQ ID NO: 1890267 - DNA, 15 bp, Homo sapiens
ggagatgaacaaaag

SEQ ID NO: 1890268 - DNA, 15 bp, Homo sapiens
gagatgaacaaaagg

SEQ ID NO: 1890269 - DNA, 15 bp, Homo sapiens
agatgaacaaaagga

SEQ ID NO: 1890270 - DNA, 15 bp, Homo sapiens
gatgaacaaaaggat

SEQ ID NO: 1890271 - DNA, 15 bp, Homo sapiens
atgaacaaaaggata

SEQ ID NO: 1890272 - DNA, 15 bp, Homo sapiens
tgaacaaaaggatat

SEQ ID NO: 1890273 - DNA, 15 bp, Homo sapiens
gaacaaaaggatatt

SEQ ID NO: 1890274 - DNA, 15 bp, Homo sapiens
aacaaaaggatatta

SEQ ID NO: 1890275 - DNA, 15 bp, Homo sapiens
acaaaaggatattag

SEQ ID NO: 1890276 - DNA, 15 bp, Homo sapiens
caaaaggatattagg

SEQ ID NO: 1890277 - DNA, 15 bp, Homo sapiens
aaaaggatattaggt

SEQ ID NO: 1890278 - DNA, 15 bp, Homo sapiens
aaaggatattaggtc

SEQ ID NO: 1890279 - DNA, 15 bp, Homo sapiens
aaggatattaggtca

SEQ ID NO: 1890280 - DNA, 15 bp, Homo sapiens
aggatattaggtcaa

SEQ ID NO: 1890281 - DNA, 15 bp, Homo sapiens
ggatattaggtcaaa

SEQ ID NO: 1890282 - DNA, 15 bp, Homo sapiens
gatattaggtcaaaa

SEQ ID NO: 1890283 - DNA, 15 bp, Homo sapiens
atattaggtcaaaaa

SEQ ID NO: 1890284 - DNA, 15 bp, Homo sapiens
tattaggtcaaaaag

SEQ ID NO: 1890285 - DNA, 15 bp, Homo sapiens
attaggtcaaaaagg

SEQ ID NO: 1890286 - DNA, 15 bp, Homo sapiens
ttaggtcaaaaaggt

SEQ ID NO: 1890287 - DNA, 15 bp, Homo sapiens
taggtcaaaaaggtt

SEQ ID NO: 1890288 - DNA, 15 bp, Homo sapiens
aggtcaaaaaggtta

SEQ ID NO: 1890289 - DNA, 15 bp, Homo sapiens
ggtcaaaaaggttat

SEQ ID NO: 1890290 - DNA, 15 bp, Homo sapiens
gtcaaaaaggttatc

SEQ ID NO: 1890291 - DNA, 15 bp, Homo sapiens
tcaaaaaggttatca

SEQ ID NO: 1890292 - DNA, 15 bp, Homo sapiens
caaaaaggttatcat

SEQ ID NO: 1890293 - DNA, 15 bp, Homo sapiens
aaaaaggttatcatg

SEQ ID NO: 1890294 - DNA, 15 bp, Homo sapiens
aaaaggttatcatgg

SEQ ID NO: 1890295 - DNA, 15 bp, Homo sapiens
aaaggttatcatgga

SEQ ID NO: 1890296 - DNA, 15 bp, Homo sapiens
aaggttatcatggaa

SEQ ID NO: 1890297 - DNA, 15 bp, Homo sapiens
aggttatcatggaaa

SEQ ID NO: 1890298 - DNA, 15 bp, Homo sapiens
ggttatcatggaaaa

SEQ ID NO: 1890299 - DNA, 15 bp, Homo sapiens
gttatcatggaaaac

SEQ ID NO: 1890300 - DNA, 15 bp, Homo sapiens
ttatcatggaaaact

SEQ ID NO: 1890301 - DNA, 15 bp, Homo sapiens
tatcatggaaaactg

SEQ ID NO: 1890302 - DNA, 15 bp, Homo sapiens
atcatggaaaactgt

SEQ ID NO: 1890303 - DNA, 15 bp, Homo sapiens
tcatggaaaactgtt

SEQ ID NO: 1890304 - DNA, 15 bp, Homo sapiens
catggaaaactgttc

SEQ ID NO: 1890305 - DNA, 15 bp, Homo sapiens
atggaaaactgttct

SEQ ID NO: 1890306 - DNA, 15 bp, Homo sapiens
tggaaaactgttcta

SEQ ID NO: 1890307 - DNA, 15 bp, Homo sapiens
ggaaaactgttctat

SEQ ID NO: 1890308 - DNA, 15 bp, Homo sapiens
gaaaactgttctatc

SEQ ID NO: 1890309 - DNA, 15 bp, Homo sapiens
aaaactgttctatcc

SEQ ID NO: 1890310 - DNA, 15 bp, Homo sapiens
aaactgttctatcct

SEQ ID NO: 1890311 - DNA, 15 bp, Homo sapiens
aactgttctatcctg

SEQ ID NO: 1890312 - DNA, 15 bp, Homo sapiens
actgttctatcctgt

SEQ ID NO: 1890313 - DNA, 15 bp, Homo sapiens
ctgttctatcctgtc

SEQ ID NO: 1890314 - DNA, 15 bp, Homo sapiens
tgttctatcctgtct

SEQ ID NO: 1890315 - DNA, 15 bp, Homo sapiens
gttctatcctgtcta

SEQ ID NO: 1890316 - DNA, 15 bp, Homo sapiens
ttctatcctgtctaa

SEQ ID NO: 1890317 - DNA, 15 bp, Homo sapiens
tctatcctgtctaaa

SEQ ID NO: 1890318 - DNA, 15 bp, Homo sapiens
ctatcctgtctaaag

SEQ ID NO: 1890319 - DNA, 15 bp, Homo sapiens
tatcctgtctaaagt

SEQ ID NO: 1890320 - DNA, 15 bp, Homo sapiens
atcctgtctaaagtt

SEQ ID NO: 1890321 - DNA, 15 bp, Homo sapiens
tcctgtctaaagttt

SEQ ID NO: 1890322 - DNA, 15 bp, Homo sapiens
cctgtctaaagtttt

SEQ ID NO: 1890323 - DNA, 15 bp, Homo sapiens
ctgtctaaagttttg

SEQ ID NO: 1890324 - DNA, 15 bp, Homo sapiens
tgtctaaagttttgc

SEQ ID NO: 1890325 - DNA, 15 bp, Homo sapiens
gtctaaagttttgca

SEQ ID NO: 1890326 - DNA, 15 bp, Homo sapiens
tctaaagttttgcac

SEQ ID NO: 1890327 - DNA, 15 bp, Homo sapiens
ctaaagttttgcacc

SEQ ID NO: 1890328 - DNA, 15 bp, Homo sapiens
taaagttttgcacca

SEQ ID NO: 1890329 - DNA, 15 bp, Homo sapiens
aaagttttgcaccat

SEQ ID NO: 1890330 - DNA, 15 bp, Homo sapiens
aagttttgcaccata

SEQ ID NO: 1890331 - DNA, 15 bp, Homo sapiens
agttttgcaccataa

SEQ ID NO: 1890332 - DNA, 15 bp, Homo sapiens
gttttgcaccataag

SEQ ID NO: 1890333 - DNA, 15 bp, Homo sapiens
ttttgcaccataagt

SEQ ID NO: 1890334 - DNA, 15 bp, Homo sapiens
tttgcaccataagtt

SEQ ID NO: 1890335 - DNA, 15 bp, Homo sapiens
ttgcaccataagttt

SEQ ID NO: 1890336 - DNA, 15 bp, Homo sapiens
tgcaccataagtttt

SEQ ID NO: 1890337 - DNA, 15 bp, Homo sapiens
gcaccataagttttc

SEQ ID NO: 1890338 - DNA, 15 bp, Homo sapiens
caccataagttttcc

SEQ ID NO: 1890339 - DNA, 15 bp, Homo sapiens
accataagttttcca

SEQ ID NO: 1890340 - DNA, 15 bp, Homo sapiens
ccataagttttccaa

SEQ ID NO: 1890341 - DNA, 15 bp, Homo sapiens
cataagttttccaag

SEQ ID NO: 1890342 - DNA, 15 bp, Homo sapiens
ataagttttccaaga

SEQ ID NO: 1890343 - DNA, 15 bp, Homo sapiens
taagttttccaagac

SEQ ID NO: 1890344 - DNA, 15 bp, Homo sapiens
aagttttccaagacc

SEQ ID NO: 1890345 - DNA, 15 bp, Homo sapiens
agttttccaagaccc

SEQ ID NO: 1890346 - DNA, 15 bp, Homo sapiens
gttttccaagaccca

SEQ ID NO: 1890347 - DNA, 15 bp, Homo sapiens
ttttccaagacccat

SEQ ID NO: 1890348 - DNA, 15 bp, Homo sapiens
tttccaagacccatc

SEQ ID NO: 1890349 - DNA, 15 bp, Homo sapiens
ttccaagacccatct

SEQ ID NO: 1890350 - DNA, 15 bp, Homo sapiens
tccaagacccatcta

SEQ ID NO: 1890351 - DNA, 15 bp, Homo sapiens
ccaagacccatctaa

SEQ ID NO: 1890352 - DNA, 15 bp, Homo sapiens
caagacccatctaat

SEQ ID NO: 1890353 - DNA, 15 bp, Homo sapiens
aagacccatctaatt

SEQ ID NO: 1890354 - DNA, 15 bp, Homo sapiens
agacccatctaattg

SEQ ID NO: 1890355 - DNA, 15 bp, Homo sapiens
gacccatctaattga

SEQ ID NO: 1890356 - DNA, 15 bp, Homo sapiens
acccatctaattgac

SEQ ID NO: 1890357 - DNA, 15 bp, Homo sapiens
cccatctaattgaca

SEQ ID NO: 1890358 - DNA, 15 bp, Homo sapiens
ccatctaattgacag

SEQ ID NO: 1890359 - DNA, 15 bp, Homo sapiens
catctaattgacagt

SEQ ID NO: 1890360 - DNA, 15 bp, Homo sapiens
atctaattgacagtt

SEQ ID NO: 1890361 - DNA, 15 bp, Homo sapiens
tctaattgacagttt

SEQ ID NO: 1890362 - DNA, 15 bp, Homo sapiens
ctaattgacagtttt

SEQ ID NO: 1890363 - DNA, 15 bp, Homo sapiens
taattgacagtttta

SEQ ID NO: 1890364 - DNA, 15 bp, Homo sapiens
aattgacagttttac

SEQ ID NO: 1890365 - DNA, 15 bp, Homo sapiens
attgacagttttact

SEQ ID NO: 1890366 - DNA, 15 bp, Homo sapiens
ttgacagttttactc

SEQ ID NO: 1890367 - DNA, 15 bp, Homo sapiens
tgacagttttactca

SEQ ID NO: 1890368 - DNA, 15 bp, Homo sapiens
gacagttttactcat

SEQ ID NO: 1890369 - DNA, 15 bp, Homo sapiens
acagttttactcata

SEQ ID NO: 1890370 - DNA, 15 bp, Homo sapiens
cagttttactcataa

SEQ ID NO: 1890371 - DNA, 15 bp, Homo sapiens
agttttactcataat

SEQ ID NO: 1890372 - DNA, 15 bp, Homo sapiens
gttttactcataatt

SEQ ID NO: 1890373 - DNA, 15 bp, Homo sapiens
ttttactcataatta

SEQ ID NO: 1890374 - DNA, 15 bp, Homo sapiens
tttactcataattac

SEQ ID NO: 1890375 - DNA, 15 bp, Homo sapiens
ttactcataattaca

SEQ ID NO: 1890376 - DNA, 15 bp, Homo sapiens
tactcataattacag

SEQ ID NO: 1890377 - DNA, 15 bp, Homo sapiens
actcataattacaga

SEQ ID NO: 1890378 - DNA, 15 bp, Homo sapiens
ctcataattacagac

SEQ ID NO: 1890379 - DNA, 15 bp, Homo sapiens
tcataattacagaca

SEQ ID NO: 1890380 - DNA, 15 bp, Homo sapiens
cataattacagacat

SEQ ID NO: 1890381 - DNA, 15 bp, Homo sapiens
ataattacagacatt

SEQ ID NO: 1890382 - DNA, 15 bp, Homo sapiens
taattacagacattt

SEQ ID NO: 1890383 - DNA, 15 bp, Homo sapiens
ttacagacatttctt

SEQ ID NO: 1890384 - DNA, 15 bp, Homo sapiens
tacagacatttcttc

SEQ ID NO: 1890385 - DNA, 15 bp, Homo sapiens
acagacatttcttcc

SEQ ID NO: 1890386 - DNA, 15 bp, Homo sapiens
cagacatttcttcca

SEQ ID NO: 1890387 - DNA, 15 bp, Homo sapiens
agacatttcttccaa

SEQ ID NO: 1890388 - DNA, 15 bp, Homo sapiens
gacatttcttccaag

SEQ ID NO: 1890389 - DNA, 15 bp, Homo sapiens
acatttcttccaaga

SEQ ID NO: 1890390 - DNA, 15 bp, Homo sapiens
catttcttccaagat

SEQ ID NO: 1890391 - DNA, 15 bp, Homo sapiens
atttcttccaagatt

SEQ ID NO: 1890392 - DNA, 15 bp, Homo sapiens
tttcttccaagatta

SEQ ID NO: 1890393 - DNA, 15 bp, Homo sapiens
ttcttccaagattat

SEQ ID NO: 1890394 - DNA, 15 bp, Homo sapiens
tcttccaagattatt

SEQ ID NO: 1890395 - DNA, 15 bp, Homo sapiens
cttccaagattattg

SEQ ID NO: 1890396 - DNA, 15 bp, Homo sapiens
ttccaagattattga

SEQ ID NO: 1890397 - DNA, 15 bp, Homo sapiens
tccaagattattgaa

SEQ ID NO: 1890398 - DNA, 15 bp, Homo sapiens
ccaagattattgaat

SEQ ID NO: 1890399 - DNA, 15 bp, Homo sapiens
caagattattgaatt

SEQ ID NO: 1890400 - DNA, 15 bp, Homo sapiens
aagattattgaatta

SEQ ID NO: 1890401 - DNA, 15 bp, Homo sapiens
agattattgaattaa

SEQ ID NO: 1890402 - DNA, 15 bp, Homo sapiens
gattattgaattaaa

SEQ ID NO: 1890403 - DNA, 15 bp, Homo sapiens
attattgaattaaag

SEQ ID NO: 1890404 - DNA, 15 bp, Homo sapiens
ttattgaattaaagt

SEQ ID NO: 1890405 - DNA, 15 bp, Homo sapiens
tattgaattaaagtt

SEQ ID NO: 1890406 - DNA, 15 bp, Homo sapiens
attgaattaaagttt

SEQ ID NO: 1890407 - DNA, 15 bp, Homo sapiens
ttgaattaaagtttg

SEQ ID NO: 1890408 - DNA, 15 bp, Homo sapiens
tgaattaaagtttgg

SEQ ID NO: 1890409 - DNA, 15 bp, Homo sapiens
gaattaaagtttggc

SEQ ID NO: 1890410 - DNA, 15 bp, Homo sapiens
aattaaagtttggct

SEQ ID NO: 1890411 - DNA, 15 bp, Homo sapiens
attaaagtttggcta

SEQ ID NO: 1890412 - DNA, 15 bp, Homo sapiens
ttaaagtttggctat

SEQ ID NO: 1890413 - DNA, 15 bp, Homo sapiens
taaagtttggctatt

SEQ ID NO: 1890414 - DNA, 15 bp, Homo sapiens
aaagtttggctatta

SEQ ID NO: 1890415 - DNA, 15 bp, Homo sapiens
aagtttggctattat

SEQ ID NO: 1890416 - DNA, 15 bp, Homo sapiens
agtttggctattatg

SEQ ID NO: 1890417 - DNA, 15 bp, Homo sapiens
gtttggctattatga

SEQ ID NO: 1890418 - DNA, 15 bp, Homo sapiens
tttggctattatgaa

SEQ ID NO: 1890419 - DNA, 15 bp, Homo sapiens
ttggctattatgaac

SEQ ID NO: 1890420 - DNA, 15 bp, Homo sapiens
tggctattatgaacc

SEQ ID NO: 1890421 - DNA, 15 bp, Homo sapiens
ggctattatgaacca

SEQ ID NO: 1890422 - DNA, 15 bp, Homo sapiens
gctattatgaaccac

SEQ ID NO: 1890423 - DNA, 15 bp, Homo sapiens
ctattatgaaccact

SEQ ID NO: 1890424 - DNA, 15 bp, Homo sapiens
tattatgaaccactt

SEQ ID NO: 1890425 - DNA, 15 bp, Homo sapiens
attatgaaccactta

SEQ ID NO: 1890426 - DNA, 15 bp, Homo sapiens
ttatgaaccacttat

SEQ ID NO: 1890427 - DNA, 15 bp, Homo sapiens
tatgaaccacttatg

SEQ ID NO: 1890428 - DNA, 15 bp, Homo sapiens
atgaaccacttatga

SEQ ID NO: 1890429 - DNA, 15 bp, Homo sapiens
tgaaccacttatgac

SEQ ID NO: 1890430 - DNA, 15 bp, Homo sapiens
gaaccacttatgact

SEQ ID NO: 1890431 - DNA, 15 bp, Homo sapiens
aaccacttatgactt

SEQ ID NO: 1890432 - DNA, 15 bp, Homo sapiens
accacttatgacttt

SEQ ID NO: 1890433 - DNA, 15 bp, Homo sapiens
ccacttatgactttt

SEQ ID NO: 1890434 - DNA, 15 bp, Homo sapiens
cacttatgacttttg

SEQ ID NO: 1890435 - DNA, 15 bp, Homo sapiens
acttatgacttttga

SEQ ID NO: 1890436 - DNA, 15 bp, Homo sapiens
cttatgacttttgaa

SEQ ID NO: 1890437 - DNA, 15 bp, Homo sapiens
ttatgacttttgaaa

SEQ ID NO: 1890438 - DNA, 15 bp, Homo sapiens
tatgacttttgaaaa

SEQ ID NO: 1890439 - DNA, 15 bp, Homo sapiens
atgacttttgaaaat

SEQ ID NO: 1890440 - DNA, 15 bp, Homo sapiens
tgacttttgaaaatt

SEQ ID NO: 1890441 - DNA, 15 bp, Homo sapiens
gacttttgaaaattc

SEQ ID NO: 1890442 - DNA, 15 bp, Homo sapiens
acttttgaaaattca

SEQ ID NO: 1890443 - DNA, 15 bp, Homo sapiens
cttttgaaaattcaa

SEQ ID NO: 1890444 - DNA, 15 bp, Homo sapiens
ttttgaaaattcaag

SEQ ID NO: 1890445 - DNA, 15 bp, Homo sapiens
tttgaaaattcaaga

SEQ ID NO: 1890446 - DNA, 15 bp, Homo sapiens
ttgaaaattcaagag

SEQ ID NO: 1890447 - DNA, 15 bp, Homo sapiens
tgaaaattcaagagt

SEQ ID NO: 1890448 - DNA, 15 bp, Homo sapiens
gaaaattcaagagtc

SEQ ID NO: 1890449 - DNA, 15 bp, Homo sapiens
aaaattcaagagtca

SEQ ID NO: 1890450 - DNA, 15 bp, Homo sapiens
aaattcaagagtcat

SEQ ID NO: 1890451 - DNA, 15 bp, Homo sapiens
aattcaagagtcatt

SEQ ID NO: 1890452 - DNA, 15 bp, Homo sapiens
attcaagagtcattc

SEQ ID NO: 1890453 - DNA, 15 bp, Homo sapiens
ttcaagagtcattct

SEQ ID NO: 1890454 - DNA, 15 bp, Homo sapiens
tcaagagtcattctc

SEQ ID NO: 1890455 - DNA, 15 bp, Homo sapiens
caagagtcattctcc

SEQ ID NO: 1890456 - DNA, 15 bp, Homo sapiens
aagagtcattctccc

SEQ ID NO: 1890457 - DNA, 15 bp, Homo sapiens
agagtcattctccct

SEQ ID NO: 1890458 - DNA, 15 bp, Homo sapiens
gagtcattctcccta

SEQ ID NO: 1890459 - DNA, 15 bp, Homo sapiens
agtcattctccctaa

SEQ ID NO: 1890460 - DNA, 15 bp, Homo sapiens
gtcattctccctaag

SEQ ID NO: 1890461 - DNA, 15 bp, Homo sapiens
tcattctccctaaga

SEQ ID NO: 1890462 - DNA, 15 bp, Homo sapiens
cattctccctaagat

SEQ ID NO: 1890463 - DNA, 15 bp, Homo sapiens
attctccctaagatg

SEQ ID NO: 1890464 - DNA, 15 bp, Homo sapiens
ttctccctaagatga

SEQ ID NO: 1890465 - DNA, 15 bp, Homo sapiens
tctccctaagatgac

SEQ ID NO: 1890466 - DNA, 15 bp, Homo sapiens
ctccctaagatgacc

SEQ ID NO: 1890467 - DNA, 15 bp, Homo sapiens
tccctaagatgacct

SEQ ID NO: 1890468 - DNA, 15 bp, Homo sapiens
ccctaagatgacctt

SEQ ID NO: 1890469 - DNA, 15 bp, Homo sapiens
cctaagatgaccttt

SEQ ID NO: 1890470 - DNA, 15 bp, Homo sapiens
ctaagatgacctttt

SEQ ID NO: 1890471 - DNA, 15 bp, Homo sapiens
taagatgaccttttg

SEQ ID NO: 1890472 - DNA, 15 bp, Homo sapiens
aagatgaccttttgt

SEQ ID NO: 1890473 - DNA, 15 bp, Homo sapiens
agatgaccttttgtt

SEQ ID NO: 1890474 - DNA, 15 bp, Homo sapiens
gatgaccttttgttt

SEQ ID NO: 1890475 - DNA, 15 bp, Homo sapiens
atgaccttttgtttc

SEQ ID NO: 1890476 - DNA, 15 bp, Homo sapiens
tgaccttttgtttca

SEQ ID NO: 1890477 - DNA, 15 bp, Homo sapiens
gaccttttgtttcag

SEQ ID NO: 1890478 - DNA, 15 bp, Homo sapiens
accttttgtttcagc

SEQ ID NO: 1890479 - DNA, 15 bp, Homo sapiens
ccttttgtttcagca

SEQ ID NO: 1890480 - DNA, 15 bp, Homo sapiens
cttttgtttcagcag

SEQ ID NO: 1890481 - DNA, 15 bp, Homo sapiens
ttttgtttcagcagc

SEQ ID NO: 1890482 - DNA, 15 bp, Homo sapiens
tttgtttcagcagca

SEQ ID NO: 1890483 - DNA, 15 bp, Homo sapiens
ttgtttcagcagcag

SEQ ID NO: 1890484 - DNA, 15 bp, Homo sapiens
tgtttcagcagcagc

SEQ ID NO: 1890485 - DNA, 15 bp, Homo sapiens
gtttcagcagcagca

SEQ ID NO: 1890486 - DNA, 15 bp, Homo sapiens
tttcagcagcagcat

SEQ ID NO: 1890487 - DNA, 15 bp, Homo sapiens
ttcagcagcagcatt

SEQ ID NO: 1890488 - DNA, 15 bp, Homo sapiens
tcagcagcagcattc

SEQ ID NO: 1890489 - DNA, 15 bp, Homo sapiens
cagcagcagcattcc

SEQ ID NO: 1890490 - DNA, 15 bp, Homo sapiens
agcagcagcattcca

SEQ ID NO: 1890491 - DNA, 15 bp, Homo sapiens
gcagcagcattccaa

SEQ ID NO: 1890492 - DNA, 15 bp, Homo sapiens
cagcagcattccaat

SEQ ID NO: 1890493 - DNA, 15 bp, Homo sapiens
agcagcattccaata

SEQ ID NO: 1890494 - DNA, 15 bp, Homo sapiens
gcagcattccaataa

SEQ ID NO: 1890495 - DNA, 15 bp, Homo sapiens
cagcattccaataac

SEQ ID NO: 1890496 - DNA, 15 bp, Homo sapiens
agcattccaataacg

SEQ ID NO: 1890497 - DNA, 15 bp, Homo sapiens
gcattccaataacgg

SEQ ID NO: 1890498 - DNA, 15 bp, Homo sapiens
cattccaataacggg

SEQ ID NO: 1890499 - DNA, 15 bp, Homo sapiens
attccaataacgggt

SEQ ID NO: 1890500 - DNA, 15 bp, Homo sapiens
ttccaataacgggtc

SEQ ID NO: 1890501 - DNA, 15 bp, Homo sapiens
tccaataacgggtcc

SEQ ID NO: 1890502 - DNA, 15 bp, Homo sapiens
ccaataacgggtcct

SEQ ID NO: 1890503 - DNA, 15 bp, Homo sapiens
caataacgggtcctt

SEQ ID NO: 1890504 - DNA, 15 bp, Homo sapiens
aataacgggtcctta

SEQ ID NO: 1890505 - DNA, 15 bp, Homo sapiens
ataacgggtccttaa

SEQ ID NO: 1890506 - DNA, 15 bp, Homo sapiens
taacgggtccttaag

SEQ ID NO: 1890507 - DNA, 15 bp, Homo sapiens
aacgggtccttaagg

SEQ ID NO: 1890508 - DNA, 15 bp, Homo sapiens
acgggtccttaagga

SEQ ID NO: 1890509 - DNA, 15 bp, Homo sapiens
cgggtccttaaggag

SEQ ID NO: 1890510 - DNA, 15 bp, Homo sapiens
gggtccttaaggagc

SEQ ID NO: 1890511 - DNA, 15 bp, Homo sapiens
ggtccttaaggagcc

SEQ ID NO: 1890512 - DNA, 15 bp, Homo sapiens
gtccttaaggagcca

SEQ ID NO: 1890513 - DNA, 15 bp, Homo sapiens
tccttaaggagccag

SEQ ID NO: 1890514 - DNA, 15 bp, Homo sapiens
ccttaaggagccaga

SEQ ID NO: 1890515 - DNA, 15 bp, Homo sapiens
cttaaggagccagaa

SEQ ID NO: 1890516 - DNA, 15 bp, Homo sapiens
ttaaggagccagaag

SEQ ID NO: 1890517 - DNA, 15 bp, Homo sapiens
taaggagccagaaga

SEQ ID NO: 1890518 - DNA, 15 bp, Homo sapiens
aaggagccagaagag

SEQ ID NO: 1890519 - DNA, 15 bp, Homo sapiens
aggagccagaagagg

SEQ ID NO: 1890520 - DNA, 15 bp, Homo sapiens
ggagccagaagaggt

SEQ ID NO: 1890521 - DNA, 15 bp, Homo sapiens
gagccagaagaggtg

SEQ ID NO: 1890522 - DNA, 15 bp, Homo sapiens
agccagaagaggtgt

SEQ ID NO: 1890523 - DNA, 15 bp, Homo sapiens
gccagaagaggtgtg

SEQ ID NO: 1890524 - DNA, 15 bp, Homo sapiens
ccagaagaggtgtgg

SEQ ID NO: 1890525 - DNA, 15 bp, Homo sapiens
cagaagaggtgtggt

SEQ ID NO: 1890526 - DNA, 15 bp, Homo sapiens
agaagaggtgtggtt

SEQ ID NO: 1890527 - DNA, 15 bp, Homo sapiens
gaagaggtgtggttt

SEQ ID NO: 1890528 - DNA, 15 bp, Homo sapiens
aagaggtgtggtttt

SEQ ID NO: 1890529 - DNA, 15 bp, Homo sapiens
agaggtgtggttttc

SEQ ID NO: 1890530 - DNA, 15 bp, Homo sapiens
gaggtgtggttttct

SEQ ID NO: 1890531 - DNA, 15 bp, Homo sapiens
aggtgtggttttctt

SEQ ID NO: 1890532 - DNA, 15 bp, Homo sapiens
ggtgtggttttcttt

SEQ ID NO: 1890533 - DNA, 15 bp, Homo sapiens
gtgtggttttctttg

SEQ ID NO: 1890534 - DNA, 15 bp, Homo sapiens
tgtggttttctttgt

SEQ ID NO: 1890535 - DNA, 15 bp, Homo sapiens
gtggttttctttgtt

SEQ ID NO: 1890536 - DNA, 15 bp, Homo sapiens
tggttttctttgttt

SEQ ID NO: 1890537 - DNA, 15 bp, Homo sapiens
ggttttctttgtttt

SEQ ID NO: 1890538 - DNA, 15 bp, Homo sapiens
gttttctttgttttt

SEQ ID NO: 1890539 - DNA, 15 bp, Homo sapiens
ttttctttgtttttt

SEQ ID NO: 1890540 - DNA, 15 bp, Homo sapiens
tttctttgttttttc

SEQ ID NO: 1890541 - DNA, 15 bp, Homo sapiens
ttctttgttttttct

SEQ ID NO: 1890542 - DNA, 15 bp, Homo sapiens
tctttgttttttcta

SEQ ID NO: 1890543 - DNA, 15 bp, Homo sapiens
ctttgttttttctac

SEQ ID NO: 1890544 - DNA, 15 bp, Homo sapiens
tttgttttttctact

SEQ ID NO: 1890545 - DNA, 15 bp, Homo sapiens
ttgttttttctactt

SEQ ID NO: 1890546 - DNA, 15 bp, Homo sapiens
tgttttttctacttt

SEQ ID NO: 1890547 - DNA, 15 bp, Homo sapiens
gttttttctactttt

SEQ ID NO: 1890548 - DNA, 15 bp, Homo sapiens
ttttttctacttttc

SEQ ID NO: 1890549 - DNA, 15 bp, Homo sapiens
tttttctacttttct

SEQ ID NO: 1890550 - DNA, 15 bp, Homo sapiens
ttttctacttttctt

SEQ ID NO: 1890551 - DNA, 15 bp, Homo sapiens
tttctacttttcttc

SEQ ID NO: 1890552 - DNA, 15 bp, Homo sapiens
ttctacttttcttca

SEQ ID NO: 1890553 - DNA, 15 bp, Homo sapiens
tctacttttcttcaa

SEQ ID NO: 1890554 - DNA, 15 bp, Homo sapiens
ctacttttcttcaac

SEQ ID NO: 1890555 - DNA, 15 bp, Homo sapiens
tacttttcttcaacc

SEQ ID NO: 1890556 - DNA, 15 bp, Homo sapiens
acttttcttcaacct

SEQ ID NO: 1890557 - DNA, 15 bp, Homo sapiens
cttttcttcaacctt

SEQ ID NO: 1890558 - DNA, 15 bp, Homo sapiens
ttttcttcaaccttg

SEQ ID NO: 1890559 - DNA, 15 bp, Homo sapiens
tttcttcaaccttgt

SEQ ID NO: 1890560 - DNA, 15 bp, Homo sapiens
ttcttcaaccttgtt

SEQ ID NO: 1890561 - DNA, 15 bp, Homo sapiens
tcttcaaccttgttt

SEQ ID NO: 1890562 - DNA, 15 bp, Homo sapiens
cttcaaccttgtttc

SEQ ID NO: 1890563 - DNA, 15 bp, Homo sapiens
ttcaaccttgtttca

SEQ ID NO: 1890564 - DNA, 15 bp, Homo sapiens
tcaaccttgtttcag

SEQ ID NO: 1890565 - DNA, 15 bp, Homo sapiens
caaccttgtttcagt

SEQ ID NO: 1890566 - DNA, 15 bp, Homo sapiens
aaccttgtttcagtt

SEQ ID NO: 1890567 - DNA, 15 bp, Homo sapiens
accttgtttcagttt

SEQ ID NO: 1890568 - DNA, 15 bp, Homo sapiens
ccttgtttcagtttt

SEQ ID NO: 1890569 - DNA, 15 bp, Homo sapiens
cttgtttcagttttt

SEQ ID NO: 1890570 - DNA, 15 bp, Homo sapiens
ttgtttcagttttta

SEQ ID NO: 1890571 - DNA, 15 bp, Homo sapiens
tgtttcagtttttac

SEQ ID NO: 1890572 - DNA, 15 bp, Homo sapiens
gtttcagtttttact

SEQ ID NO: 1890573 - DNA, 15 bp, Homo sapiens
tttcagtttttactt

SEQ ID NO: 1890574 - DNA, 15 bp, Homo sapiens
ttcagtttttacttt

SEQ ID NO: 1890575 - DNA, 15 bp, Homo sapiens
tcagtttttacttta

SEQ ID NO: 1890576 - DNA, 15 bp, Homo sapiens
cagtttttactttat

SEQ ID NO: 1890577 - DNA, 15 bp, Homo sapiens
agtttttactttatt

SEQ ID NO: 1890578 - DNA, 15 bp, Homo sapiens
gtttttactttattg

SEQ ID NO: 1890579 - DNA, 15 bp, Homo sapiens
tttttactttattgt

SEQ ID NO: 1890580 - DNA, 15 bp, Homo sapiens
ttttactttattgtt

SEQ ID NO: 1890581 - DNA, 15 bp, Homo sapiens
tttactttattgttt

SEQ ID NO: 1890582 - DNA, 15 bp, Homo sapiens
ttactttattgtttt

SEQ ID NO: 1890583 - DNA, 15 bp, Homo sapiens
tactttattgttttt

SEQ ID NO: 1890584 - DNA, 15 bp, Homo sapiens
actttattgtttttc

SEQ ID NO: 1890585 - DNA, 15 bp, Homo sapiens
ctttattgtttttct

SEQ ID NO: 1890586 - DNA, 15 bp, Homo sapiens
tttattgtttttctt

SEQ ID NO: 1890587 - DNA, 15 bp, Homo sapiens
ttattgtttttcttc

SEQ ID NO: 1890588 - DNA, 15 bp, Homo sapiens
tattgtttttcttca

SEQ ID NO: 1890589 - DNA, 15 bp, Homo sapiens
attgtttttcttcat

SEQ ID NO: 1890590 - DNA, 15 bp, Homo sapiens
ttgtttttcttcatc

SEQ ID NO: 1890591 - DNA, 15 bp, Homo sapiens
tgtttttcttcatcc

SEQ ID NO: 1890592 - DNA, 15 bp, Homo sapiens
gtttttcttcatcct

SEQ ID NO: 1890593 - DNA, 15 bp, Homo sapiens
tttttcttcatcctg

SEQ ID NO: 1890594 - DNA, 15 bp, Homo sapiens
ttttcttcatcctgc

SEQ ID NO: 1890595 - DNA, 15 bp, Homo sapiens
tttcttcatcctgcc

SEQ ID NO: 1890596 - DNA, 15 bp, Homo sapiens
ttcttcatcctgccc

SEQ ID NO: 1890597 - DNA, 15 bp, Homo sapiens
tcttcatcctgcccc

SEQ ID NO: 1890598 - DNA, 15 bp, Homo sapiens
cttcatcctgcccca

SEQ ID NO: 1890599 - DNA, 15 bp, Homo sapiens
ttcatcctgccccat

SEQ ID NO: 1890600 - DNA, 15 bp, Homo sapiens
tcatcctgccccata

SEQ ID NO: 1890601 - DNA, 15 bp, Homo sapiens
catcctgccccataa

SEQ ID NO: 1890602 - DNA, 15 bp, Homo sapiens
atcctgccccataat

SEQ ID NO: 1890603 - DNA, 15 bp, Homo sapiens
tcctgccccataatt

SEQ ID NO: 1890604 - DNA, 15 bp, Homo sapiens
cctgccccataattt

SEQ ID NO: 1890605 - DNA, 15 bp, Homo sapiens
ctgccccataatttc

SEQ ID NO: 1890606 - DNA, 15 bp, Homo sapiens
tgccccataatttca

SEQ ID NO: 1890607 - DNA, 15 bp, Homo sapiens
gccccataatttcat

SEQ ID NO: 1890608 - DNA, 15 bp, Homo sapiens
ccccataatttcatt

SEQ ID NO: 1890609 - DNA, 15 bp, Homo sapiens
cccataatttcattc

SEQ ID NO: 1890610 - DNA, 15 bp, Homo sapiens
ccataatttcattcc

SEQ ID NO: 1890611 - DNA, 15 bp, Homo sapiens
cataatttcattcca

SEQ ID NO: 1890612 - DNA, 15 bp, Homo sapiens
ataatttcattccac

SEQ ID NO: 1890613 - DNA, 15 bp, Homo sapiens
taatttcattccact

SEQ ID NO: 1890614 - DNA, 15 bp, Homo sapiens
aatttcattccactg

SEQ ID NO: 1890615 - DNA, 15 bp, Homo sapiens
atttcattccactgc

SEQ ID NO: 1890616 - DNA, 15 bp, Homo sapiens
tttcattccactgct

SEQ ID NO: 1890617 - DNA, 15 bp, Homo sapiens
ttcattccactgctg

SEQ ID NO: 1890618 - DNA, 15 bp, Homo sapiens
tcattccactgctgt

SEQ ID NO: 1890619 - DNA, 15 bp, Homo sapiens
cattccactgctgtt

SEQ ID NO: 1890620 - DNA, 15 bp, Homo sapiens
attccactgctgttt

SEQ ID NO: 1890621 - DNA, 15 bp, Homo sapiens
ttccactgctgtttc

SEQ ID NO: 1890622 - DNA, 15 bp, Homo sapiens
tccactgctgtttca

SEQ ID NO: 1890623 - DNA, 15 bp, Homo sapiens
ccactgctgtttcaa

SEQ ID NO: 1890624 - DNA, 15 bp, Homo sapiens
cactgctgtttcaaa

SEQ ID NO: 1890625 - DNA, 15 bp, Homo sapiens
actgctgtttcaaat

SEQ ID NO: 1890626 - DNA, 15 bp, Homo sapiens
ctgctgtttcaaata

SEQ ID NO: 1890627 - DNA, 15 bp, Homo sapiens
tgctgtttcaaatag

SEQ ID NO: 1890628 - DNA, 15 bp, Homo sapiens
gctgtttcaaataga

SEQ ID NO: 1890629 - DNA, 15 bp, Homo sapiens
ctgtttcaaatagac

SEQ ID NO: 1890630 - DNA, 15 bp, Homo sapiens
tgtttcaaatagaca

SEQ ID NO: 1890631 - DNA, 15 bp, Homo sapiens
gtttcaaatagacat

SEQ ID NO: 1890632 - DNA, 15 bp, Homo sapiens
tttcaaatagacatc

SEQ ID NO: 1890633 - DNA, 15 bp, Homo sapiens
ttcaaatagacatcg

SEQ ID NO: 1890634 - DNA, 15 bp, Homo sapiens
tcaaatagacatcga

SEQ ID NO: 1890635 - DNA, 15 bp, Homo sapiens
caaatagacatcgag

SEQ ID NO: 1890636 - DNA, 15 bp, Homo sapiens
aaatagacatcgaga

SEQ ID NO: 1890637 - DNA, 15 bp, Homo sapiens
aatagacatcgagat

SEQ ID NO: 1890638 - DNA, 15 bp, Homo sapiens
atagacatcgagatt

SEQ ID NO: 1890639 - DNA, 15 bp, Homo sapiens
tagacatcgagatta

SEQ ID NO: 1890640 - DNA, 15 bp, Homo sapiens
agacatcgagattag

SEQ ID NO: 1890641 - DNA, 15 bp, Homo sapiens
gacatcgagattaga

SEQ ID NO: 1890642 - DNA, 15 bp, Homo sapiens
acatcgagattagag

SEQ ID NO: 1890643 - DNA, 15 bp, Homo sapiens
catcgagattagagc

SEQ ID NO: 1890644 - DNA, 15 bp, Homo sapiens
atcgagattagagca

SEQ ID NO: 1890645 - DNA, 15 bp, Homo sapiens
tcgagattagagcac

SEQ ID NO: 1890646 - DNA, 15 bp, Homo sapiens
cgagattagagcacc

SEQ ID NO: 1890647 - DNA, 15 bp, Homo sapiens
gagattagagcacca

SEQ ID NO: 1890648 - DNA, 15 bp, Homo sapiens
agattagagcaccaa

SEQ ID NO: 1890649 - DNA, 15 bp, Homo sapiens
gattagagcaccaac

SEQ ID NO: 1890650 - DNA, 15 bp, Homo sapiens
attagagcaccaaca

SEQ ID NO: 1890651 - DNA, 15 bp, Homo sapiens
ttagagcaccaacac

SEQ ID NO: 1890652 - DNA, 15 bp, Homo sapiens
tagagcaccaacaca

SEQ ID NO: 1890653 - DNA, 15 bp, Homo sapiens
agagcaccaacacaa

SEQ ID NO: 1890654 - DNA, 15 bp, Homo sapiens
gagcaccaacacaat

SEQ ID NO: 1890655 - DNA, 15 bp, Homo sapiens
agcaccaacacaatt

SEQ ID NO: 1890656 - DNA, 15 bp, Homo sapiens
gcaccaacacaattt

SEQ ID NO: 1890657 - DNA, 15 bp, Homo sapiens
caccaacacaatttc

SEQ ID NO: 1890658 - DNA, 15 bp, Homo sapiens
accaacacaatttca

SEQ ID NO: 1890659 - DNA, 15 bp, Homo sapiens
ccaacacaatttcaa

SEQ ID NO: 1890660 - DNA, 15 bp, Homo sapiens
caacacaatttcaaa

SEQ ID NO: 1890661 - DNA, 15 bp, Homo sapiens
aacacaatttcaaac

SEQ ID NO: 1890662 - DNA, 15 bp, Homo sapiens
acacaatttcaaact

SEQ ID NO: 1890663 - DNA, 15 bp, Homo sapiens
cacaatttcaaactc

SEQ ID NO: 1890664 - DNA, 15 bp, Homo sapiens
acaatttcaaactct

SEQ ID NO: 1890665 - DNA, 15 bp, Homo sapiens
caatttcaaactctg

SEQ ID NO: 1890666 - DNA, 15 bp, Homo sapiens
aatttcaaactctgc

SEQ ID NO: 1890667 - DNA, 15 bp, Homo sapiens
atttcaaactctgct

SEQ ID NO: 1890668 - DNA, 15 bp, Homo sapiens
tttcaaactctgctg

SEQ ID NO: 1890669 - DNA, 15 bp, Homo sapiens
ttcaaactctgctgg

SEQ ID NO: 1890670 - DNA, 15 bp, Homo sapiens
tcaaactctgctgga

SEQ ID NO: 1890671 - DNA, 15 bp, Homo sapiens
caaactctgctggaa

SEQ ID NO: 1890672 - DNA, 15 bp, Homo sapiens
aaactctgctggaac

SEQ ID NO: 1890673 - DNA, 15 bp, Homo sapiens
aactctgctggaact

SEQ ID NO: 1890674 - DNA, 15 bp, Homo sapiens
actctgctggaactg

SEQ ID NO: 1890675 - DNA, 15 bp, Homo sapiens
ctctgctggaactgt

SEQ ID NO: 1890676 - DNA, 15 bp, Homo sapiens
tctgctggaactgta

SEQ ID NO: 1890677 - DNA, 15 bp, Homo sapiens
ctgctggaactgtaa

SEQ ID NO: 1890678 - DNA, 15 bp, Homo sapiens
tgctggaactgtaag

SEQ ID NO: 1890679 - DNA, 15 bp, Homo sapiens
gctggaactgtaagc

SEQ ID NO: 1890680 - DNA, 15 bp, Homo sapiens
ctggaactgtaagca

SEQ ID NO: 1890681 - DNA, 15 bp, Homo sapiens
tggaactgtaagcaa

SEQ ID NO: 1890682 - DNA, 15 bp, Homo sapiens
ggaactgtaagcaaa

SEQ ID NO: 1890683 - DNA, 15 bp, Homo sapiens
gaactgtaagcaaag

SEQ ID NO: 1890684 - DNA, 15 bp, Homo sapiens
aactgtaagcaaaga

SEQ ID NO: 1890685 - DNA, 15 bp, Homo sapiens
actgtaagcaaagat

SEQ ID NO: 1890686 - DNA, 15 bp, Homo sapiens
ctgtaagcaaagata

SEQ ID NO: 1890687 - DNA, 15 bp, Homo sapiens
tgtaagcaaagataa

SEQ ID NO: 1890688 - DNA, 15 bp, Homo sapiens
gtaagcaaagataaa

SEQ ID NO: 1890689 - DNA, 15 bp, Homo sapiens
taagcaaagataaat

SEQ ID NO: 1890690 - DNA, 15 bp, Homo sapiens
aagcaaagataaatg

SEQ ID NO: 1890691 - DNA, 15 bp, Homo sapiens
agcaaagataaatgc

SEQ ID NO: 1890692 - DNA, 15 bp, Homo sapiens
gcaaagataaatgca

SEQ ID NO: 1890693 - DNA, 15 bp, Homo sapiens
caaagataaatgcag

SEQ ID NO: 1890694 - DNA, 15 bp, Homo sapiens
aaagataaatgcagt

SEQ ID NO: 1890695 - DNA, 15 bp, Homo sapiens
aagataaatgcagta

SEQ ID NO: 1890696 - DNA, 15 bp, Homo sapiens
agataaatgcagtac

SEQ ID NO: 1890697 - DNA, 15 bp, Homo sapiens
gataaatgcagtaca

SEQ ID NO: 1890698 - DNA, 15 bp, Homo sapiens
ataaatgcagtacac

SEQ ID NO: 1890699 - DNA, 15 bp, Homo sapiens
taaatgcagtacaca

SEQ ID NO: 1890700 - DNA, 15 bp, Homo sapiens
aaatgcagtacacat

SEQ ID NO: 1890701 - DNA, 15 bp, Homo sapiens
aatgcagtacacatg

SEQ ID NO: 1890702 - DNA, 15 bp, Homo sapiens
atgcagtacacatgt

SEQ ID NO: 1890703 - DNA, 15 bp, Homo sapiens
tgcagtacacatgtt

SEQ ID NO: 1890704 - DNA, 15 bp, Homo sapiens
gcagtacacatgttg

SEQ ID NO: 1890705 - DNA, 15 bp, Homo sapiens
cagtacacatgttga

SEQ ID NO: 1890706 - DNA, 15 bp, Homo sapiens
agtacacatgttgag

SEQ ID NO: 1890707 - DNA, 15 bp, Homo sapiens
gtacacatgttgaga

SEQ ID NO: 1890708 - DNA, 15 bp, Homo sapiens
tacacatgttgagaa

SEQ ID NO: 1890709 - DNA, 15 bp, Homo sapiens
acacatgttgagaaa

SEQ ID NO: 1890710 - DNA, 15 bp, Homo sapiens
cacatgttgagaaat

SEQ ID NO: 1890711 - DNA, 15 bp, Homo sapiens
acatgttgagaaata

SEQ ID NO: 1890712 - DNA, 15 bp, Homo sapiens
catgttgagaaataa

SEQ ID NO: 1890713 - DNA, 15 bp, Homo sapiens
atgttgagaaataac

SEQ ID NO: 1890714 - DNA, 15 bp, Homo sapiens
tgttgagaaataaca

SEQ ID NO: 1890715 - DNA, 15 bp, Homo sapiens
gttgagaaataacaa

SEQ ID NO: 1890716 - DNA, 15 bp, Homo sapiens
ttgagaaataacaag

SEQ ID NO: 1890717 - DNA, 15 bp, Homo sapiens
tgagaaataacaagt

SEQ ID NO: 1890718 - DNA, 15 bp, Homo sapiens
gagaaataacaagtt

SEQ ID NO: 1890719 - DNA, 15 bp, Homo sapiens
agaaataacaagttt

SEQ ID NO: 1890720 - DNA, 15 bp, Homo sapiens
gaaataacaagtttc

SEQ ID NO: 1890721 - DNA, 15 bp, Homo sapiens
aaataacaagtttct

SEQ ID NO: 1890722 - DNA, 15 bp, Homo sapiens
aataacaagtttctg

SEQ ID NO: 1890723 - DNA, 15 bp, Homo sapiens
ataacaagtttctga

SEQ ID NO: 1890724 - DNA, 15 bp, Homo sapiens
taacaagtttctgat

SEQ ID NO: 1890725 - DNA, 15 bp, Homo sapiens
aacaagtttctgatt

SEQ ID NO: 1890726 - DNA, 15 bp, Homo sapiens
acaagtttctgattc

SEQ ID NO: 1890727 - DNA, 15 bp, Homo sapiens
caagtttctgattcc

SEQ ID NO: 1890728 - DNA, 15 bp, Homo sapiens
aagtttctgattccc

SEQ ID NO: 1890729 - DNA, 15 bp, Homo sapiens
agtttctgattccct

SEQ ID NO: 1890730 - DNA, 15 bp, Homo sapiens
gtttctgattcccta

SEQ ID NO: 1890731 - DNA, 15 bp, Homo sapiens
tttctgattccctat

SEQ ID NO: 1890732 - DNA, 15 bp, Homo sapiens
ttctgattccctatt

SEQ ID NO: 1890733 - DNA, 15 bp, Homo sapiens
tctgattccctatta

SEQ ID NO: 1890734 - DNA, 15 bp, Homo sapiens
ctgattccctattag

SEQ ID NO: 1890735 - DNA, 15 bp, Homo sapiens
tgattccctattaga

SEQ ID NO: 1890736 - DNA, 15 bp, Homo sapiens
gattccctattagaa

SEQ ID NO: 1890737 - DNA, 15 bp, Homo sapiens
attccctattagaac

SEQ ID NO: 1890738 - DNA, 15 bp, Homo sapiens
ttccctattagaacg

SEQ ID NO: 1890739 - DNA, 15 bp, Homo sapiens
tccctattagaacgt

SEQ ID NO: 1890740 - DNA, 15 bp, Homo sapiens
ccctattagaacgta

SEQ ID NO: 1890741 - DNA, 15 bp, Homo sapiens
cctattagaacgtac

SEQ ID NO: 1890742 - DNA, 15 bp, Homo sapiens
ctattagaacgtaca

SEQ ID NO: 1890743 - DNA, 15 bp, Homo sapiens
tattagaacgtacaa

SEQ ID NO: 1890744 - DNA, 15 bp, Homo sapiens
attagaacgtacaac

SEQ ID NO: 1890745 - DNA, 15 bp, Homo sapiens
ttagaacgtacaaca

SEQ ID NO: 1890746 - DNA, 15 bp, Homo sapiens
tagaacgtacaacac

SEQ ID NO: 1890747 - DNA, 15 bp, Homo sapiens
agaacgtacaacact

SEQ ID NO: 1890748 - DNA, 15 bp, Homo sapiens
gaacgtacaacactg

SEQ ID NO: 1890749 - DNA, 15 bp, Homo sapiens
aacgtacaacactga

SEQ ID NO: 1890750 - DNA, 15 bp, Homo sapiens
acgtacaacactgat

SEQ ID NO: 1890751 - DNA, 15 bp, Homo sapiens
cgtacaacactgatc

SEQ ID NO: 1890752 - DNA, 15 bp, Homo sapiens
gtacaacactgatca

SEQ ID NO: 1890753 - DNA, 15 bp, Homo sapiens
tacaacactgatcaa

SEQ ID NO: 1890754 - DNA, 15 bp, Homo sapiens
acaacactgatcaat

SEQ ID NO: 1890755 - DNA, 15 bp, Homo sapiens
caacactgatcaatt

SEQ ID NO: 1890756 - DNA, 15 bp, Homo sapiens
aacactgatcaattt

SEQ ID NO: 1890757 - DNA, 15 bp, Homo sapiens
acactgatcaatttt

SEQ ID NO: 1890758 - DNA, 15 bp, Homo sapiens
cactgatcaattttg

SEQ ID NO: 1890759 - DNA, 15 bp, Homo sapiens
actgatcaattttgg

SEQ ID NO: 1890760 - DNA, 15 bp, Homo sapiens
ctgatcaattttggc

SEQ ID NO: 1890761 - DNA, 15 bp, Homo sapiens
tgatcaattttggct

SEQ ID NO: 1890762 - DNA, 15 bp, Homo sapiens
gatcaattttggctt

SEQ ID NO: 1890763 - DNA, 15 bp, Homo sapiens
atcaattttggcttc

SEQ ID NO: 1890764 - DNA, 15 bp, Homo sapiens
tcaattttggcttct

SEQ ID NO: 1890765 - DNA, 15 bp, Homo sapiens
caattttggcttcta

SEQ ID NO: 1890766 - DNA, 15 bp, Homo sapiens
aattttggcttctag

SEQ ID NO: 1890767 - DNA, 15 bp, Homo sapiens
attttggcttctagg

SEQ ID NO: 1890768 - DNA, 15 bp, Homo sapiens
ttttggcttctagga

SEQ ID NO: 1890769 - DNA, 15 bp, Homo sapiens
tttggcttctaggag

SEQ ID NO: 1890770 - DNA, 15 bp, Homo sapiens
ttggcttctaggagc

SEQ ID NO: 1890771 - DNA, 15 bp, Homo sapiens
tggcttctaggagct

SEQ ID NO: 1890772 - DNA, 15 bp, Homo sapiens
ggcttctaggagcta

SEQ ID NO: 1890773 - DNA, 15 bp, Homo sapiens
gcttctaggagctaa

SEQ ID NO: 1890774 - DNA, 15 bp, Homo sapiens
cttctaggagctaaa

SEQ ID NO: 1890775 - DNA, 15 bp, Homo sapiens
ttctaggagctaaat

SEQ ID NO: 1890776 - DNA, 15 bp, Homo sapiens
tctaggagctaaatt

SEQ ID NO: 1890777 - DNA, 15 bp, Homo sapiens
ctaggagctaaattg

SEQ ID NO: 1890778 - DNA, 15 bp, Homo sapiens
taggagctaaattgg

SEQ ID NO: 1890779 - DNA, 15 bp, Homo sapiens
aggagctaaattgga

SEQ ID NO: 1890780 - DNA, 15 bp, Homo sapiens
ggagctaaattggat

SEQ ID NO: 1890781 - DNA, 15 bp, Homo sapiens
gagctaaattggatg

SEQ ID NO: 1890782 - DNA, 15 bp, Homo sapiens
agctaaattggatgt

SEQ ID NO: 1890783 - DNA, 15 bp, Homo sapiens
gctaaattggatgta

SEQ ID NO: 1890784 - DNA, 15 bp, Homo sapiens
ctaaattggatgtaa

SEQ ID NO: 1890785 - DNA, 15 bp, Homo sapiens
taaattggatgtaaa

SEQ ID NO: 1890786 - DNA, 15 bp, Homo sapiens
aaattggatgtaaat

SEQ ID NO: 1890787 - DNA, 15 bp, Homo sapiens
aattggatgtaaatg

SEQ ID NO: 1890788 - DNA, 15 bp, Homo sapiens
attggatgtaaatgt

SEQ ID NO: 1890789 - DNA, 15 bp, Homo sapiens
ttggatgtaaatgtt

SEQ ID NO: 1890790 - DNA, 15 bp, Homo sapiens
tggatgtaaatgttt

SEQ ID NO: 1890791 - DNA, 15 bp, Homo sapiens
ggatgtaaatgtttg

SEQ ID NO: 1890792 - DNA, 15 bp, Homo sapiens
gatgtaaatgtttgc

SEQ ID NO: 1890793 - DNA, 15 bp, Homo sapiens
atgtaaatgtttgca

SEQ ID NO: 1890794 - DNA, 15 bp, Homo sapiens
tgtaaatgtttgcaa

SEQ ID NO: 1890795 - DNA, 15 bp, Homo sapiens
gtaaatgtttgcaaa

SEQ ID NO: 1890796 - DNA, 15 bp, Homo sapiens
taaatgtttgcaaaa

SEQ ID NO: 1890797 - DNA, 15 bp, Homo sapiens
aaatgtttgcaaaat

SEQ ID NO: 1890798 - DNA, 15 bp, Homo sapiens
aatgtttgcaaaatg

SEQ ID NO: 1890799 - DNA, 15 bp, Homo sapiens
atgtttgcaaaatga

SEQ ID NO: 1890800 - DNA, 15 bp, Homo sapiens
tgtttgcaaaatgaa

SEQ ID NO: 1890801 - DNA, 15 bp, Homo sapiens
gtttgcaaaatgaag

SEQ ID NO: 1890802 - DNA, 15 bp, Homo sapiens
tttgcaaaatgaagg

SEQ ID NO: 1890803 - DNA, 15 bp, Homo sapiens
ttgcaaaatgaagga

SEQ ID NO: 1890804 - DNA, 15 bp, Homo sapiens
tgcaaaatgaaggaa

SEQ ID NO: 1890805 - DNA, 15 bp, Homo sapiens
gcaaaatgaaggaag

SEQ ID NO: 1890806 - DNA, 15 bp, Homo sapiens
caaaatgaaggaagc

SEQ ID NO: 1890807 - DNA, 15 bp, Homo sapiens
aaaatgaaggaagct

SEQ ID NO: 1890808 - DNA, 15 bp, Homo sapiens
aaatgaaggaagcta

SEQ ID NO: 1890809 - DNA, 15 bp, Homo sapiens
aatgaaggaagctaa

SEQ ID NO: 1890810 - DNA, 15 bp, Homo sapiens
atgaaggaagctaat

SEQ ID NO: 1890811 - DNA, 15 bp, Homo sapiens
tgaaggaagctaata

SEQ ID NO: 1890812 - DNA, 15 bp, Homo sapiens
gaaggaagctaatat

SEQ ID NO: 1890813 - DNA, 15 bp, Homo sapiens
aaggaagctaatatc

SEQ ID NO: 1890814 - DNA, 15 bp, Homo sapiens
aggaagctaatatca

SEQ ID NO: 1890815 - DNA, 15 bp, Homo sapiens
ggaagctaatatcaa

SEQ ID NO: 1890816 - DNA, 15 bp, Homo sapiens
gaagctaatatcaag

SEQ ID NO: 1890817 - DNA, 15 bp, Homo sapiens
aagctaatatcaaga

SEQ ID NO: 1890818 - DNA, 15 bp, Homo sapiens
agctaatatcaagat

SEQ ID NO: 1890819 - DNA, 15 bp, Homo sapiens
gctaatatcaagata

SEQ ID NO: 1890820 - DNA, 15 bp, Homo sapiens
ctaatatcaagatat

SEQ ID NO: 1890821 - DNA, 15 bp, Homo sapiens
taatatcaagatatt

SEQ ID NO: 1890822 - DNA, 15 bp, Homo sapiens
aatatcaagatattt

SEQ ID NO: 1890823 - DNA, 15 bp, Homo sapiens
atatcaagatatttg

SEQ ID NO: 1890824 - DNA, 15 bp, Homo sapiens
tatcaagatatttga

SEQ ID NO: 1890825 - DNA, 15 bp, Homo sapiens
atcaagatatttgag

SEQ ID NO: 1890826 - DNA, 15 bp, Homo sapiens
tcaagatatttgaga

SEQ ID NO: 1890827 - DNA, 15 bp, Homo sapiens
caagatatttgagat

SEQ ID NO: 1890828 - DNA, 15 bp, Homo sapiens
aagatatttgagatg

SEQ ID NO: 1890829 - DNA, 15 bp, Homo sapiens
agatatttgagatgt

SEQ ID NO: 1890830 - DNA, 15 bp, Homo sapiens
gatatttgagatgtt

SEQ ID NO: 1890831 - DNA, 15 bp, Homo sapiens
atatttgagatgtta

SEQ ID NO: 1890832 - DNA, 15 bp, Homo sapiens
tatttgagatgttag

SEQ ID NO: 1890833 - DNA, 15 bp, Homo sapiens
atttgagatgttagt

SEQ ID NO: 1890834 - DNA, 15 bp, Homo sapiens
tttgagatgttagta

SEQ ID NO: 1890835 - DNA, 15 bp, Homo sapiens
ttgagatgttagtac

SEQ ID NO: 1890836 - DNA, 15 bp, Homo sapiens
tgagatgttagtaca

SEQ ID NO: 1890837 - DNA, 15 bp, Homo sapiens
gagatgttagtacat

SEQ ID NO: 1890838 - DNA, 15 bp, Homo sapiens
agatgttagtacatt

SEQ ID NO: 1890839 - DNA, 15 bp, Homo sapiens
gatgttagtacatta

SEQ ID NO: 1890840 - DNA, 15 bp, Homo sapiens
atgttagtacattaa

SEQ ID NO: 1890841 - DNA, 15 bp, Homo sapiens
tgttagtacattaat

SEQ ID NO: 1890842 - DNA, 15 bp, Homo sapiens
gttagtacattaatt

SEQ ID NO: 1890843 - DNA, 15 bp, Homo sapiens
ttagtacattaattt

SEQ ID NO: 1890844 - DNA, 15 bp, Homo sapiens
tagtacattaattta

SEQ ID NO: 1890845 - DNA, 15 bp, Homo sapiens
agtacattaatttag

SEQ ID NO: 1890846 - DNA, 15 bp, Homo sapiens
gtacattaatttagg

SEQ ID NO: 1890847 - DNA, 15 bp, Homo sapiens
tacattaatttagga

SEQ ID NO: 1890848 - DNA, 15 bp, Homo sapiens
acattaatttaggat

SEQ ID NO: 1890849 - DNA, 15 bp, Homo sapiens
cattaatttaggatt

SEQ ID NO: 1890850 - DNA, 15 bp, Homo sapiens
attaatttaggattt

SEQ ID NO: 1890851 - DNA, 15 bp, Homo sapiens
ttaatttaggatttt

SEQ ID NO: 1890852 - DNA, 15 bp, Homo sapiens
taatttaggatttta

SEQ ID NO: 1890853 - DNA, 15 bp, Homo sapiens
aatttaggattttat

SEQ ID NO: 1890854 - DNA, 15 bp, Homo sapiens
atttaggattttatt

SEQ ID NO: 1890855 - DNA, 15 bp, Homo sapiens
tttaggattttattc

SEQ ID NO: 1890856 - DNA, 15 bp, Homo sapiens
ttaggattttattca

SEQ ID NO: 1890857 - DNA, 15 bp, Homo sapiens
taggattttattcag

SEQ ID NO: 1890858 - DNA, 15 bp, Homo sapiens
aggattttattcagc

SEQ ID NO: 1890859 - DNA, 15 bp, Homo sapiens
ggattttattcagca

SEQ ID NO: 1890860 - DNA, 15 bp, Homo sapiens
gattttattcagcaa

SEQ ID NO: 1890861 - DNA, 15 bp, Homo sapiens
attttattcagcaaa

SEQ ID NO: 1890862 - DNA, 15 bp, Homo sapiens
ttttattcagcaaac

SEQ ID NO: 1890863 - DNA, 15 bp, Homo sapiens
tttattcagcaaaca

SEQ ID NO: 1890864 - DNA, 15 bp, Homo sapiens
ttattcagcaaacac

SEQ ID NO: 1890865 - DNA, 15 bp, Homo sapiens
tattcagcaaacact

SEQ ID NO: 1890866 - DNA, 15 bp, Homo sapiens
attcagcaaacactg

SEQ ID NO: 1890867 - DNA, 15 bp, Homo sapiens
ttcagcaaacactga

SEQ ID NO: 1890868 - DNA, 15 bp, Homo sapiens
tcagcaaacactgag

SEQ ID NO: 1890869 - DNA, 15 bp, Homo sapiens
cagcaaacactgagc

SEQ ID NO: 1890870 - DNA, 15 bp, Homo sapiens
agcaaacactgagcg

SEQ ID NO: 1890871 - DNA, 15 bp, Homo sapiens
gcaaacactgagcgc

SEQ ID NO: 1890872 - DNA, 15 bp, Homo sapiens
caaacactgagcgcc

SEQ ID NO: 1890873 - DNA, 15 bp, Homo sapiens
aaacactgagcgcca

SEQ ID NO: 1890874 - DNA, 15 bp, Homo sapiens
aacactgagcgccaa

SEQ ID NO: 1890875 - DNA, 15 bp, Homo sapiens
acactgagcgccaac

SEQ ID NO: 1890876 - DNA, 15 bp, Homo sapiens
cactgagcgccaact

SEQ ID NO: 1890877 - DNA, 15 bp, Homo sapiens
actgagcgccaacta

SEQ ID NO: 1890878 - DNA, 15 bp, Homo sapiens
ctgagcgccaactat

SEQ ID NO: 1890879 - DNA, 15 bp, Homo sapiens
tgagcgccaactata

SEQ ID NO: 1890880 - DNA, 15 bp, Homo sapiens
gagcgccaactatat

SEQ ID NO: 1890881 - DNA, 15 bp, Homo sapiens
agcgccaactatatt

SEQ ID NO: 1890882 - DNA, 15 bp, Homo sapiens
gcgccaactatattt

SEQ ID NO: 1890883 - DNA, 15 bp, Homo sapiens
cgccaactatatttc

SEQ ID NO: 1890884 - DNA, 15 bp, Homo sapiens
gccaactatatttca

SEQ ID NO: 1890885 - DNA, 15 bp, Homo sapiens
ccaactatatttcag

SEQ ID NO: 1890886 - DNA, 15 bp, Homo sapiens
caactatatttcaga

SEQ ID NO: 1890887 - DNA, 15 bp, Homo sapiens
aactatatttcagac

SEQ ID NO: 1890888 - DNA, 15 bp, Homo sapiens
actatatttcagaca

SEQ ID NO: 1890889 - DNA, 15 bp, Homo sapiens
ctatatttcagacat

SEQ ID NO: 1890890 - DNA, 15 bp, Homo sapiens
tatatttcagacatt

SEQ ID NO: 1890891 - DNA, 15 bp, Homo sapiens
atatttcagacattg

SEQ ID NO: 1890892 - DNA, 15 bp, Homo sapiens
tatttcagacattgt

SEQ ID NO: 1890893 - DNA, 15 bp, Homo sapiens
atttcagacattgtt

SEQ ID NO: 1890894 - DNA, 15 bp, Homo sapiens
tttcagacattgttt

SEQ ID NO: 1890895 - DNA, 15 bp, Homo sapiens
ttcagacattgtttt

SEQ ID NO: 1890896 - DNA, 15 bp, Homo sapiens
tcagacattgttttt

SEQ ID NO: 1890897 - DNA, 15 bp, Homo sapiens
cagacattgtttttt

SEQ ID NO: 1890898 - DNA, 15 bp, Homo sapiens
agacattgttttttg

SEQ ID NO: 1890899 - DNA, 15 bp, Homo sapiens
gacattgttttttgt

SEQ ID NO: 1890900 - DNA, 15 bp, Homo sapiens
acattgttttttgtt

SEQ ID NO: 1890901 - DNA, 15 bp, Homo sapiens
cattgttttttgttg

SEQ ID NO: 1890902 - DNA, 15 bp, Homo sapiens
attgttttttgttgt

SEQ ID NO: 1890903 - DNA, 15 bp, Homo sapiens
ttgttttttgttgtg

SEQ ID NO: 1890904 - DNA, 15 bp, Homo sapiens
tgttttttgttgtgg

SEQ ID NO: 1890905 - DNA, 15 bp, Homo sapiens
gttttttgttgtggg

SEQ ID NO: 1890906 - DNA, 15 bp, Homo sapiens
ttttttgttgtgggt

SEQ ID NO: 1890907 - DNA, 15 bp, Homo sapiens
tttttgttgtgggtg

SEQ ID NO: 1890908 - DNA, 15 bp, Homo sapiens
ttttgttgtgggtgc

SEQ ID NO: 1890909 - DNA, 15 bp, Homo sapiens
tttgttgtgggtgca

SEQ ID NO: 1890910 - DNA, 15 bp, Homo sapiens
ttgttgtgggtgcaa

SEQ ID NO: 1890911 - DNA, 15 bp, Homo sapiens
tgttgtgggtgcaag

SEQ ID NO: 1890912 - DNA, 15 bp, Homo sapiens
gttgtgggtgcaagg

SEQ ID NO: 1890913 - DNA, 15 bp, Homo sapiens
ttgtgggtgcaaggt

SEQ ID NO: 1890914 - DNA, 15 bp, Homo sapiens
tgtgggtgcaaggtg

SEQ ID NO: 1890915 - DNA, 15 bp, Homo sapiens
gtgggtgcaaggtga

SEQ ID NO: 1890916 - DNA, 15 bp, Homo sapiens
tgggtgcaaggtgat

SEQ ID NO: 1890917 - DNA, 15 bp, Homo sapiens
gggtgcaaggtgatg

SEQ ID NO: 1890918 - DNA, 15 bp, Homo sapiens
ggtgcaaggtgatga

SEQ ID NO: 1890919 - DNA, 15 bp, Homo sapiens
gtgcaaggtgatgaa

SEQ ID NO: 1890920 - DNA, 15 bp, Homo sapiens
tgcaaggtgatgaag

SEQ ID NO: 1890921 - DNA, 15 bp, Homo sapiens
gcaaggtgatgaaga

SEQ ID NO: 1890922 - DNA, 15 bp, Homo sapiens
caaggtgatgaagaa

SEQ ID NO: 1890923 - DNA, 15 bp, Homo sapiens
aaggtgatgaagaag

SEQ ID NO: 1890924 - DNA, 15 bp, Homo sapiens
aggtgatgaagaagc

SEQ ID NO: 1890925 - DNA, 15 bp, Homo sapiens
ggtgatgaagaagca

SEQ ID NO: 1890926 - DNA, 15 bp, Homo sapiens
gtgatgaagaagcac

SEQ ID NO: 1890927 - DNA, 15 bp, Homo sapiens
tgatgaagaagcaca

SEQ ID NO: 1890928 - DNA, 15 bp, Homo sapiens
gatgaagaagcacag

SEQ ID NO: 1890929 - DNA, 15 bp, Homo sapiens
atgaagaagcacagc

SEQ ID NO: 1890930 - DNA, 15 bp, Homo sapiens
tgaagaagcacagct

SEQ ID NO: 1890931 - DNA, 15 bp, Homo sapiens
gaagaagcacagctt

SEQ ID NO: 1890932 - DNA, 15 bp, Homo sapiens
aagaagcacagcttt

SEQ ID NO: 1890933 - DNA, 15 bp, Homo sapiens
agaagcacagctttt

SEQ ID NO: 1890934 - DNA, 15 bp, Homo sapiens
gaagcacagctttta

SEQ ID NO: 1890935 - DNA, 15 bp, Homo sapiens
aagcacagcttttac

SEQ ID NO: 1890936 - DNA, 15 bp, Homo sapiens
agcacagcttttact

SEQ ID NO: 1890937 - DNA, 15 bp, Homo sapiens
gcacagcttttactc

SEQ ID NO: 1890938 - DNA, 15 bp, Homo sapiens
cacagcttttactcc

SEQ ID NO: 1890939 - DNA, 15 bp, Homo sapiens
acagcttttactcct

SEQ ID NO: 1890940 - DNA, 15 bp, Homo sapiens
cagcttttactccta

SEQ ID NO: 1890941 - DNA, 15 bp, Homo sapiens
agcttttactcctaa

SEQ ID NO: 1890942 - DNA, 15 bp, Homo sapiens
gcttttactcctaaa

SEQ ID NO: 1890943 - DNA, 15 bp, Homo sapiens
cttttactcctaaat

SEQ ID NO: 1890944 - DNA, 15 bp, Homo sapiens
ttttactcctaaatc

SEQ ID NO: 1890945 - DNA, 15 bp, Homo sapiens
tttactcctaaatca

SEQ ID NO: 1890946 - DNA, 15 bp, Homo sapiens
ttactcctaaatcac

SEQ ID NO: 1890947 - DNA, 15 bp, Homo sapiens
tactcctaaatcaca

SEQ ID NO: 1890948 - DNA, 15 bp, Homo sapiens
actcctaaatcacac

SEQ ID NO: 1890949 - DNA, 15 bp, Homo sapiens
ctcctaaatcacacc

SEQ ID NO: 1890950 - DNA, 15 bp, Homo sapiens
tcctaaatcacacca

SEQ ID NO: 1890951 - DNA, 15 bp, Homo sapiens
cctaaatcacaccat

SEQ ID NO: 1890952 - DNA, 15 bp, Homo sapiens
ctaaatcacaccatg

SEQ ID NO: 1890953 - DNA, 15 bp, Homo sapiens
taaatcacaccatgt

SEQ ID NO: 1890954 - DNA, 15 bp, Homo sapiens
aaatcacaccatgta

SEQ ID NO: 1890955 - DNA, 15 bp, Homo sapiens
aatcacaccatgtac

SEQ ID NO: 1890956 - DNA, 15 bp, Homo sapiens
atcacaccatgtacg

SEQ ID NO: 1890957 - DNA, 15 bp, Homo sapiens
tcacaccatgtacgc

SEQ ID NO: 1890958 - DNA, 15 bp, Homo sapiens
cacaccatgtacgca

SEQ ID NO: 1890959 - DNA, 15 bp, Homo sapiens
acaccatgtacgcag

SEQ ID NO: 1890960 - DNA, 15 bp, Homo sapiens
caccatgtacgcagg

SEQ ID NO: 1890961 - DNA, 15 bp, Homo sapiens
accatgtacgcagga

SEQ ID NO: 1890962 - DNA, 15 bp, Homo sapiens
ccatgtacgcaggac

SEQ ID NO: 1890963 - DNA, 15 bp, Homo sapiens
catgtacgcaggaca

SEQ ID NO: 1890964 - DNA, 15 bp, Homo sapiens
atgtacgcaggacag

SEQ ID NO: 1890965 - DNA, 15 bp, Homo sapiens
tgtacgcaggacagg

SEQ ID NO: 1890966 - DNA, 15 bp, Homo sapiens
gtacgcaggacaggg

SEQ ID NO: 1890967 - DNA, 15 bp, Homo sapiens
tacgcaggacaggga

SEQ ID NO: 1890968 - DNA, 15 bp, Homo sapiens
acgcaggacagggaa

SEQ ID NO: 1890969 - DNA, 15 bp, Homo sapiens
cgcaggacagggaag

SEQ ID NO: 1890970 - DNA, 15 bp, Homo sapiens
gcaggacagggaagt

SEQ ID NO: 1890971 - DNA, 15 bp, Homo sapiens
caggacagggaagta

SEQ ID NO: 1890972 - DNA, 15 bp, Homo sapiens
aggacagggaagtaa

SEQ ID NO: 1890973 - DNA, 15 bp, Homo sapiens
ggacagggaagtaag

SEQ ID NO: 1890974 - DNA, 15 bp, Homo sapiens
gacagggaagtaaga

SEQ ID NO: 1890975 - DNA, 15 bp, Homo sapiens
acagggaagtaagag

SEQ ID NO: 1890976 - DNA, 15 bp, Homo sapiens
cagggaagtaagaga

SEQ ID NO: 1890977 - DNA, 15 bp, Homo sapiens
agggaagtaagagaa

SEQ ID NO: 1890978 - DNA, 15 bp, Homo sapiens
gggaagtaagagaac

SEQ ID NO: 1890979 - DNA, 15 bp, Homo sapiens
ggaagtaagagaaca

SEQ ID NO: 1890980 - DNA, 15 bp, Homo sapiens
gaagtaagagaacag

SEQ ID NO: 1890981 - DNA, 15 bp, Homo sapiens
aagtaagagaacagg

SEQ ID NO: 1890982 - DNA, 15 bp, Homo sapiens
agtaagagaacaggc

SEQ ID NO: 1890983 - DNA, 15 bp, Homo sapiens
gtaagagaacaggca

SEQ ID NO: 1890984 - DNA, 15 bp, Homo sapiens
taagagaacaggcaa

SEQ ID NO: 1890985 - DNA, 15 bp, Homo sapiens
aagagaacaggcaat

SEQ ID NO: 1890986 - DNA, 15 bp, Homo sapiens
agagaacaggcaatt

SEQ ID NO: 1890987 - DNA, 15 bp, Homo sapiens
gagaacaggcaattg

SEQ ID NO: 1890988 - DNA, 15 bp, Homo sapiens
agaacaggcaattgc

SEQ ID NO: 1890989 - DNA, 15 bp, Homo sapiens
gaacaggcaattgct

SEQ ID NO: 1890990 - DNA, 15 bp, Homo sapiens
aacaggcaattgctg

SEQ ID NO: 1890991 - DNA, 15 bp, Homo sapiens
acaggcaattgctgt

SEQ ID NO: 1890992 - DNA, 15 bp, Homo sapiens
caggcaattgctgtt

SEQ ID NO: 1890993 - DNA, 15 bp, Homo sapiens
aggcaattgctgtta

SEQ ID NO: 1890994 - DNA, 15 bp, Homo sapiens
ggcaattgctgttaa

SEQ ID NO: 1890995 - DNA, 15 bp, Homo sapiens
gcaattgctgttaag

SEQ ID NO: 1890996 - DNA, 15 bp, Homo sapiens
caattgctgttaagt

SEQ ID NO: 1890997 - DNA, 15 bp, Homo sapiens
aattgctgttaagta

SEQ ID NO: 1890998 - DNA, 15 bp, Homo sapiens
attgctgttaagtat

SEQ ID NO: 1890999 - DNA, 15 bp, Homo sapiens
ttgctgttaagtata

SEQ ID NO: 1891000 - DNA, 15 bp, Homo sapiens
tgctgttaagtataa

SEQ ID NO: 1891001 - DNA, 15 bp, Homo sapiens
gctgttaagtataaa

SEQ ID NO: 1891002 - DNA, 15 bp, Homo sapiens
ctgttaagtataaag

SEQ ID NO: 1891003 - DNA, 15 bp, Homo sapiens
tgttaagtataaaga

SEQ ID NO: 1891004 - DNA, 15 bp, Homo sapiens
gttaagtataaagat

SEQ ID NO: 1891005 - DNA, 15 bp, Homo sapiens
ttaagtataaagatt

SEQ ID NO: 1891006 - DNA, 15 bp, Homo sapiens
taagtataaagattg

SEQ ID NO: 1891007 - DNA, 15 bp, Homo sapiens
aagtataaagattgt

SEQ ID NO: 1891008 - DNA, 15 bp, Homo sapiens
agtataaagattgtg

SEQ ID NO: 1891009 - DNA, 15 bp, Homo sapiens
gtataaagattgtga

SEQ ID NO: 1891010 - DNA, 15 bp, Homo sapiens
tataaagattgtgat

SEQ ID NO: 1891011 - DNA, 15 bp, Homo sapiens
ataaagattgtgata

SEQ ID NO: 1891012 - DNA, 15 bp, Homo sapiens
taaagattgtgatac

SEQ ID NO: 1891013 - DNA, 15 bp, Homo sapiens
aaagattgtgataca

SEQ ID NO: 1891014 - DNA, 15 bp, Homo sapiens
aagattgtgatacac

SEQ ID NO: 1891015 - DNA, 15 bp, Homo sapiens
agattgtgatacact

SEQ ID NO: 1891016 - DNA, 15 bp, Homo sapiens
gattgtgatacactt

SEQ ID NO: 1891017 - DNA, 15 bp, Homo sapiens
attgtgatacacttt

SEQ ID NO: 1891018 - DNA, 15 bp, Homo sapiens
ttgtgatacacttta

SEQ ID NO: 1891019 - DNA, 15 bp, Homo sapiens
tgtgatacactttag

SEQ ID NO: 1891020 - DNA, 15 bp, Homo sapiens
gtgatacactttagc

SEQ ID NO: 1891021 - DNA, 15 bp, Homo sapiens
tgatacactttagcc

SEQ ID NO: 1891022 - DNA, 15 bp, Homo sapiens
gatacactttagccc

SEQ ID NO: 1891023 - DNA, 15 bp, Homo sapiens
atacactttagccca

SEQ ID NO: 1891024 - DNA, 15 bp, Homo sapiens
tacactttagcccag

SEQ ID NO: 1891025 - DNA, 15 bp, Homo sapiens
acactttagcccagg

SEQ ID NO: 1891026 - DNA, 15 bp, Homo sapiens
cactttagcccagga

SEQ ID NO: 1891027 - DNA, 15 bp, Homo sapiens
actttagcccaggat

SEQ ID NO: 1891028 - DNA, 15 bp, Homo sapiens
ctttagcccaggatg

SEQ ID NO: 1891029 - DNA, 15 bp, Homo sapiens
tttagcccaggatgg

SEQ ID NO: 1891030 - DNA, 15 bp, Homo sapiens
ttagcccaggatgga

SEQ ID NO: 1891031 - DNA, 15 bp, Homo sapiens
tagcccaggatggaa

SEQ ID NO: 1891032 - DNA, 15 bp, Homo sapiens
agcccaggatggaag

SEQ ID NO: 1891033 - DNA, 15 bp, Homo sapiens
gcccaggatggaagg

SEQ ID NO: 1891034 - DNA, 15 bp, Homo sapiens
cccaggatggaaggg

SEQ ID NO: 1891035 - DNA, 15 bp, Homo sapiens
ccaggatggaagggg

SEQ ID NO: 1891036 - DNA, 15 bp, Homo sapiens
caggatggaaggggc

SEQ ID NO: 1891037 - DNA, 15 bp, Homo sapiens
aggatggaaggggca

SEQ ID NO: 1891038 - DNA, 15 bp, Homo sapiens
ggatggaaggggcac

SEQ ID NO: 1891039 - DNA, 15 bp, Homo sapiens
gatggaaggggcact

SEQ ID NO: 1891040 - DNA, 15 bp, Homo sapiens
atggaaggggcactg

SEQ ID NO: 1891041 - DNA, 15 bp, Homo sapiens
tggaaggggcactgc

SEQ ID NO: 1891042 - DNA, 15 bp, Homo sapiens
ggaaggggcactgca

SEQ ID NO: 1891043 - DNA, 15 bp, Homo sapiens
gaaggggcactgcat

SEQ ID NO: 1891044 - DNA, 15 bp, Homo sapiens
aaggggcactgcatg

SEQ ID NO: 1891045 - DNA, 15 bp, Homo sapiens
aggggcactgcatgc

SEQ ID NO: 1891046 - DNA, 15 bp, Homo sapiens
ggggcactgcatgca

SEQ ID NO: 1891047 - DNA, 15 bp, Homo sapiens
gggcactgcatgcag

SEQ ID NO: 1891048 - DNA, 15 bp, Homo sapiens
ggcactgcatgcagc

SEQ ID NO: 1891049 - DNA, 15 bp, Homo sapiens
gcactgcatgcagca

SEQ ID NO: 1891050 - DNA, 15 bp, Homo sapiens
cactgcatgcagcaa

SEQ ID NO: 1891051 - DNA, 15 bp, Homo sapiens
actgcatgcagcaag

SEQ ID NO: 1891052 - DNA, 15 bp, Homo sapiens
ctgcatgcagcaagg

SEQ ID NO: 1891053 - DNA, 15 bp, Homo sapiens
tgcatgcagcaagga

SEQ ID NO: 1891054 - DNA, 15 bp, Homo sapiens
gcatgcagcaaggag

SEQ ID NO: 1891055 - DNA, 15 bp, Homo sapiens
catgcagcaaggagg

SEQ ID NO: 1891056 - DNA, 15 bp, Homo sapiens
atgcagcaaggagga

SEQ ID NO: 1891057 - DNA, 15 bp, Homo sapiens
tgcagcaaggaggag

SEQ ID NO: 1891058 - DNA, 15 bp, Homo sapiens
gcagcaaggaggagt

SEQ ID NO: 1891059 - DNA, 15 bp, Homo sapiens
cagcaaggaggagtg

SEQ ID NO: 1891060 - DNA, 15 bp, Homo sapiens
agcaaggaggagtga

SEQ ID NO: 1891061 - DNA, 15 bp, Homo sapiens
gcaaggaggagtgac

SEQ ID NO: 1891062 - DNA, 15 bp, Homo sapiens
caaggaggagtgacg

SEQ ID NO: 1891063 - DNA, 15 bp, Homo sapiens
aaggaggagtgacgg

SEQ ID NO: 1891064 - DNA, 15 bp, Homo sapiens
aggaggagtgacggg

SEQ ID NO: 1891065 - DNA, 15 bp, Homo sapiens
ggaggagtgacggga

SEQ ID NO: 1891066 - DNA, 15 bp, Homo sapiens
gaggagtgacgggag

SEQ ID NO: 1891067 - DNA, 15 bp, Homo sapiens
aggagtgacgggagt

SEQ ID NO: 1891068 - DNA, 15 bp, Homo sapiens
ggagtgacgggagtc

SEQ ID NO: 1891069 - DNA, 15 bp, Homo sapiens
gagtgacgggagtct

SEQ ID NO: 1891070 - DNA, 15 bp, Homo sapiens
agtgacgggagtctt

SEQ ID NO: 1891071 - DNA, 15 bp, Homo sapiens
gtgacgggagtcttc

SEQ ID NO: 1891072 - DNA, 15 bp, Homo sapiens
tgacgggagtcttcc

SEQ ID NO: 1891073 - DNA, 15 bp, Homo sapiens
gacgggagtcttccc

SEQ ID NO: 1891074 - DNA, 15 bp, Homo sapiens
acgggagtcttcccc

SEQ ID NO: 1891075 - DNA, 15 bp, Homo sapiens
cgggagtcttcccct

SEQ ID NO: 1891076 - DNA, 15 bp, Homo sapiens
ggagtcttccccttg

SEQ ID NO: 1891077 - DNA, 15 bp, Homo sapiens
gagtcttccccttgg

SEQ ID NO: 1891078 - DNA, 15 bp, Homo sapiens
agtcttccccttgga

SEQ ID NO: 1891079 - DNA, 15 bp, Homo sapiens
gtcttccccttggag

SEQ ID NO: 1891080 - DNA, 15 bp, Homo sapiens
tcttccccttggagg

SEQ ID NO: 1891081 - DNA, 15 bp, Homo sapiens
cttccccttggaggt

SEQ ID NO: 1891082 - DNA, 15 bp, Homo sapiens
ttccccttggaggtg

SEQ ID NO: 1891083 - DNA, 15 bp, Homo sapiens
tccccttggaggtgg

SEQ ID NO: 1891084 - DNA, 15 bp, Homo sapiens
ccccttggaggtggt

SEQ ID NO: 1891085 - DNA, 15 bp, Homo sapiens
cccttggaggtggtg

SEQ ID NO: 1891086 - DNA, 15 bp, Homo sapiens
ccttggaggtggtgt

SEQ ID NO: 1891087 - DNA, 15 bp, Homo sapiens
cttggaggtggtgtc

SEQ ID NO: 1891088 - DNA, 15 bp, Homo sapiens
ttggaggtggtgtct

SEQ ID NO: 1891089 - DNA, 15 bp, Homo sapiens
tggaggtggtgtctg

SEQ ID NO: 1891090 - DNA, 15 bp, Homo sapiens
ggaggtggtgtctga

SEQ ID NO: 1891091 - DNA, 15 bp, Homo sapiens
gaggtggtgtctgaa

SEQ ID NO: 1891092 - DNA, 15 bp, Homo sapiens
aggtggtgtctgaac

SEQ ID NO: 1891093 - DNA, 15 bp, Homo sapiens
ggtggtgtctgaact

SEQ ID NO: 1891094 - DNA, 15 bp, Homo sapiens
gtggtgtctgaactg

SEQ ID NO: 1891095 - DNA, 15 bp, Homo sapiens
tggtgtctgaactgg

SEQ ID NO: 1891096 - DNA, 15 bp, Homo sapiens
ggtgtctgaactgga

SEQ ID NO: 1891097 - DNA, 15 bp, Homo sapiens
gtgtctgaactggac

SEQ ID NO: 1891098 - DNA, 15 bp, Homo sapiens
tgtctgaactggaca

SEQ ID NO: 1891099 - DNA, 15 bp, Homo sapiens
gtctgaactggacag

SEQ ID NO: 1891100 - DNA, 15 bp, Homo sapiens
tctgaactggacagc

SEQ ID NO: 1891101 - DNA, 15 bp, Homo sapiens
ctgaactggacagca

SEQ ID NO: 1891102 - DNA, 15 bp, Homo sapiens
tgaactggacagcaa

SEQ ID NO: 1891103 - DNA, 15 bp, Homo sapiens
gaactggacagcaaa

SEQ ID NO: 1891104 - DNA, 15 bp, Homo sapiens
aactggacagcaaag

SEQ ID NO: 1891105 - DNA, 15 bp, Homo sapiens
actggacagcaaagg

SEQ ID NO: 1891106 - DNA, 15 bp, Homo sapiens
ctggacagcaaaggt

SEQ ID NO: 1891107 - DNA, 15 bp, Homo sapiens
tggacagcaaaggtg

SEQ ID NO: 1891108 - DNA, 15 bp, Homo sapiens
ggacagcaaaggtgc

SEQ ID NO: 1891109 - DNA, 15 bp, Homo sapiens
gacagcaaaggtgct

SEQ ID NO: 1891110 - DNA, 15 bp, Homo sapiens
acagcaaaggtgctt

SEQ ID NO: 1891111 - DNA, 15 bp, Homo sapiens
cagcaaaggtgcttg

SEQ ID NO: 1891112 - DNA, 15 bp, Homo sapiens
agcaaaggtgcttga

SEQ ID NO: 1891113 - DNA, 15 bp, Homo sapiens
gcaaaggtgcttgag

SEQ ID NO: 1891114 - DNA, 15 bp, Homo sapiens
caaaggtgcttgagg

SEQ ID NO: 1891115 - DNA, 15 bp, Homo sapiens
aaaggtgcttgaggc

SEQ ID NO: 1891116 - DNA, 15 bp, Homo sapiens
aaggtgcttgaggca

SEQ ID NO: 1891117 - DNA, 15 bp, Homo sapiens
aggtgcttgaggcaa

SEQ ID NO: 1891118 - DNA, 15 bp, Homo sapiens
ggtgcttgaggcaag

SEQ ID NO: 1891119 - DNA, 15 bp, Homo sapiens
gtgcttgaggcaagg

SEQ ID NO: 1891120 - DNA, 15 bp, Homo sapiens
tgcttgaggcaagga

SEQ ID NO: 1891121 - DNA, 15 bp, Homo sapiens
gcttgaggcaaggaa

SEQ ID NO: 1891122 - DNA, 15 bp, Homo sapiens
cttgaggcaaggaaa

SEQ ID NO: 1891123 - DNA, 15 bp, Homo sapiens
ttgaggcaaggaaag

SEQ ID NO: 1891124 - DNA, 15 bp, Homo sapiens
tgaggcaaggaaagc

SEQ ID NO: 1891125 - DNA, 15 bp, Homo sapiens
gaggcaaggaaagca

SEQ ID NO: 1891126 - DNA, 15 bp, Homo sapiens
aggcaaggaaagcat

SEQ ID NO: 1891127 - DNA, 15 bp, Homo sapiens
ggcaaggaaagcata

SEQ ID NO: 1891128 - DNA, 15 bp, Homo sapiens
gcaaggaaagcatat

SEQ ID NO: 1891129 - DNA, 15 bp, Homo sapiens
caaggaaagcatatg

SEQ ID NO: 1891130 - DNA, 15 bp, Homo sapiens
aaggaaagcatatgg

SEQ ID NO: 1891131 - DNA, 15 bp, Homo sapiens
aggaaagcatatgga

SEQ ID NO: 1891132 - DNA, 15 bp, Homo sapiens
ggaaagcatatggaa

SEQ ID NO: 1891133 - DNA, 15 bp, Homo sapiens
gaaagcatatggaaa

SEQ ID NO: 1891134 - DNA, 15 bp, Homo sapiens
aaagcatatggaaat

SEQ ID NO: 1891135 - DNA, 15 bp, Homo sapiens
aagcatatggaaatg

SEQ ID NO: 1891136 - DNA, 15 bp, Homo sapiens
agcatatggaaatgt

SEQ ID NO: 1891137 - DNA, 15 bp, Homo sapiens
gcatatggaaatgtg

SEQ ID NO: 1891138 - DNA, 15 bp, Homo sapiens
catatggaaatgtgc

SEQ ID NO: 1891139 - DNA, 15 bp, Homo sapiens
atatggaaatgtgca

SEQ ID NO: 1891140 - DNA, 15 bp, Homo sapiens
tatggaaatgtgcag

SEQ ID NO: 1891141 - DNA, 15 bp, Homo sapiens
atggaaatgtgcaga

SEQ ID NO: 1891142 - DNA, 15 bp, Homo sapiens
tggaaatgtgcagag

SEQ ID NO: 1891143 - DNA, 15 bp, Homo sapiens
ggaaatgtgcagagg

SEQ ID NO: 1891144 - DNA, 15 bp, Homo sapiens
gaaatgtgcagaggc

SEQ ID NO: 1891145 - DNA, 15 bp, Homo sapiens
aaatgtgcagaggca

SEQ ID NO: 1891146 - DNA, 15 bp, Homo sapiens
aatgtgcagaggcac

SEQ ID NO: 1891147 - DNA, 15 bp, Homo sapiens
atgtgcagaggcaca

SEQ ID NO: 1891148 - DNA, 15 bp, Homo sapiens
tgtgcagaggcacaa

SEQ ID NO: 1891149 - DNA, 15 bp, Homo sapiens
gtgcagaggcacaat

SEQ ID NO: 1891150 - DNA, 15 bp, Homo sapiens
tgcagaggcacaatt

SEQ ID NO: 1891151 - DNA, 15 bp, Homo sapiens
gcagaggcacaattg

SEQ ID NO: 1891152 - DNA, 15 bp, Homo sapiens
cagaggcacaattgg

SEQ ID NO: 1891153 - DNA, 15 bp, Homo sapiens
agaggcacaattggc

SEQ ID NO: 1891154 - DNA, 15 bp, Homo sapiens
gaggcacaattggca

SEQ ID NO: 1891155 - DNA, 15 bp, Homo sapiens
aggcacaattggcat

SEQ ID NO: 1891156 - DNA, 15 bp, Homo sapiens
ggcacaattggcatg

SEQ ID NO: 1891157 - DNA, 15 bp, Homo sapiens
gcacaattggcatgg

SEQ ID NO: 1891158 - DNA, 15 bp, Homo sapiens
cacaattggcatggc

SEQ ID NO: 1891159 - DNA, 15 bp, Homo sapiens
acaattggcatggct

SEQ ID NO: 1891160 - DNA, 15 bp, Homo sapiens
caattggcatggctt

SEQ ID NO: 1891161 - DNA, 15 bp, Homo sapiens
aattggcatggctta

SEQ ID NO: 1891162 - DNA, 15 bp, Homo sapiens
attggcatggcttat

SEQ ID NO: 1891163 - DNA, 15 bp, Homo sapiens
ttggcatggcttatt

SEQ ID NO: 1891164 - DNA, 15 bp, Homo sapiens
tggcatggcttattt

SEQ ID NO: 1891165 - DNA, 15 bp, Homo sapiens
ggcatggcttatttg

SEQ ID NO: 1891166 - DNA, 15 bp, Homo sapiens
gcatggcttatttgg

SEQ ID NO: 1891167 - DNA, 15 bp, Homo sapiens
catggcttatttgga

SEQ ID NO: 1891168 - DNA, 15 bp, Homo sapiens
atggcttatttggag

SEQ ID NO: 1891169 - DNA, 15 bp, Homo sapiens
tggcttatttggaga

SEQ ID NO: 1891170 - DNA, 15 bp, Homo sapiens
ggcttatttggagaa

SEQ ID NO: 1891171 - DNA, 15 bp, Homo sapiens
gcttatttggagaat

SEQ ID NO: 1891172 - DNA, 15 bp, Homo sapiens
cttatttggagaatt

SEQ ID NO: 1891173 - DNA, 15 bp, Homo sapiens
ttatttggagaattg

SEQ ID NO: 1891174 - DNA, 15 bp, Homo sapiens
tatttggagaattgt

SEQ ID NO: 1891175 - DNA, 15 bp, Homo sapiens
atttggagaattgtc

SEQ ID NO: 1891176 - DNA, 15 bp, Homo sapiens
tttggagaattgtct

SEQ ID NO: 1891177 - DNA, 15 bp, Homo sapiens
ttggagaattgtctg

SEQ ID NO: 1891178 - DNA, 15 bp, Homo sapiens
tggagaattgtctgt

SEQ ID NO: 1891179 - DNA, 15 bp, Homo sapiens
ggagaattgtctgta

SEQ ID NO: 1891180 - DNA, 15 bp, Homo sapiens
gagaattgtctgtat

SEQ ID NO: 1891181 - DNA, 15 bp, Homo sapiens
agaattgtctgtatc

SEQ ID NO: 1891182 - DNA, 15 bp, Homo sapiens
gaattgtctgtatcc

SEQ ID NO: 1891183 - DNA, 15 bp, Homo sapiens
aattgtctgtatccc

SEQ ID NO: 1891184 - DNA, 15 bp, Homo sapiens
attgtctgtatccct

SEQ ID NO: 1891185 - DNA, 15 bp, Homo sapiens
ttgtctgtatccctt

SEQ ID NO: 1891186 - DNA, 15 bp, Homo sapiens
tgtctgtatccctta

SEQ ID NO: 1891187 - DNA, 15 bp, Homo sapiens
gtctgtatcccttag

SEQ ID NO: 1891188 - DNA, 15 bp, Homo sapiens
tctgtatcccttaga

SEQ ID NO: 1891189 - DNA, 15 bp, Homo sapiens
ctgtatcccttagag

SEQ ID NO: 1891190 - DNA, 15 bp, Homo sapiens
tgtatcccttagagc

SEQ ID NO: 1891191 - DNA, 15 bp, Homo sapiens
gtatcccttagagca

SEQ ID NO: 1891192 - DNA, 15 bp, Homo sapiens
tatcccttagagcag

SEQ ID NO: 1891193 - DNA, 15 bp, Homo sapiens
atcccttagagcaga

SEQ ID NO: 1891194 - DNA, 15 bp, Homo sapiens
tcccttagagcagag

SEQ ID NO: 1891195 - DNA, 15 bp, Homo sapiens
cccttagagcagagg

SEQ ID NO: 1891196 - DNA, 15 bp, Homo sapiens
ccttagagcagaggg

SEQ ID NO: 1891197 - DNA, 15 bp, Homo sapiens
cttagagcagaggga

SEQ ID NO: 1891198 - DNA, 15 bp, Homo sapiens
ttagagcagagggat

SEQ ID NO: 1891199 - DNA, 15 bp, Homo sapiens
tagagcagagggatg

SEQ ID NO: 1891200 - DNA, 15 bp, Homo sapiens
agagcagagggatga

SEQ ID NO: 1891201 - DNA, 15 bp, Homo sapiens
gagcagagggatgag

SEQ ID NO: 1891202 - DNA, 15 bp, Homo sapiens
agcagagggatgagg

SEQ ID NO: 1891203 - DNA, 15 bp, Homo sapiens
gcagagggatgagga

SEQ ID NO: 1891204 - DNA, 15 bp, Homo sapiens
cagagggatgaggag

SEQ ID NO: 1891205 - DNA, 15 bp, Homo sapiens
agagggatgaggagg

SEQ ID NO: 1891206 - DNA, 15 bp, Homo sapiens
gagggatgaggaggg

SEQ ID NO: 1891207 - DNA, 15 bp, Homo sapiens
agggatgaggaggga

SEQ ID NO: 1891208 - DNA, 15 bp, Homo sapiens
gggatgaggagggat

SEQ ID NO: 1891209 - DNA, 15 bp, Homo sapiens
ggatgaggagggatg

SEQ ID NO: 1891210 - DNA, 15 bp, Homo sapiens
gatgaggagggatgc

SEQ ID NO: 1891211 - DNA, 15 bp, Homo sapiens
atgaggagggatgca

SEQ ID NO: 1891212 - DNA, 15 bp, Homo sapiens
tgaggagggatgcag

SEQ ID NO: 1891213 - DNA, 15 bp, Homo sapiens
gaggagggatgcagt

SEQ ID NO: 1891214 - DNA, 15 bp, Homo sapiens
aggagggatgcagtg

SEQ ID NO: 1891215 - DNA, 15 bp, Homo sapiens
ggagggatgcagtga

SEQ ID NO: 1891216 - DNA, 15 bp, Homo sapiens
gagggatgcagtgaa

SEQ ID NO: 1891217 - DNA, 15 bp, Homo sapiens
agggatgcagtgaag

SEQ ID NO: 1891218 - DNA, 15 bp, Homo sapiens
gggatgcagtgaagg

SEQ ID NO: 1891219 - DNA, 15 bp, Homo sapiens
ggatgcagtgaaggg

SEQ ID NO: 1891220 - DNA, 15 bp, Homo sapiens
gatgcagtgaagggc

SEQ ID NO: 1891221 - DNA, 15 bp, Homo sapiens
atgcagtgaagggca

SEQ ID NO: 1891222 - DNA, 15 bp, Homo sapiens
tgcagtgaagggcag

SEQ ID NO: 1891223 - DNA, 15 bp, Homo sapiens
gcagtgaagggcaga

SEQ ID NO: 1891224 - DNA, 15 bp, Homo sapiens
cagtgaagggcagaa

SEQ ID NO: 1891225 - DNA, 15 bp, Homo sapiens
agtgaagggcagaag

SEQ ID NO: 1891226 - DNA, 15 bp, Homo sapiens
gtgaagggcagaaga

SEQ ID NO: 1891227 - DNA, 15 bp, Homo sapiens
tgaagggcagaagat

SEQ ID NO: 1891228 - DNA, 15 bp, Homo sapiens
gaagggcagaagatg

SEQ ID NO: 1891229 - DNA, 15 bp, Homo sapiens
aagggcagaagatgc

SEQ ID NO: 1891230 - DNA, 15 bp, Homo sapiens
agggcagaagatgcc

SEQ ID NO: 1891231 - DNA, 15 bp, Homo sapiens
gggcagaagatgcct

SEQ ID NO: 1891232 - DNA, 15 bp, Homo sapiens
ggcagaagatgcctt

SEQ ID NO: 1891233 - DNA, 15 bp, Homo sapiens
gcagaagatgccttg

SEQ ID NO: 1891234 - DNA, 15 bp, Homo sapiens
cagaagatgccttgg

SEQ ID NO: 1891235 - DNA, 15 bp, Homo sapiens
agaagatgccttggg

SEQ ID NO: 1891236 - DNA, 15 bp, Homo sapiens
gaagatgccttgggt

SEQ ID NO: 1891237 - DNA, 15 bp, Homo sapiens
aagatgccttgggtg

SEQ ID NO: 1891238 - DNA, 15 bp, Homo sapiens
agatgccttgggtga

SEQ ID NO: 1891239 - DNA, 15 bp, Homo sapiens
gatgccttgggtgag

SEQ ID NO: 1891240 - DNA, 15 bp, Homo sapiens
atgccttgggtgagt

SEQ ID NO: 1891241 - DNA, 15 bp, Homo sapiens
tgccttgggtgagtt

SEQ ID NO: 1891242 - DNA, 15 bp, Homo sapiens
gccttgggtgagtta

SEQ ID NO: 1891243 - DNA, 15 bp, Homo sapiens
agcagagaacaggaa

SEQ ID NO: 1891244 - DNA, 15 bp, Homo sapiens
gcagagaacaggaaa

SEQ ID NO: 1891245 - DNA, 15 bp, Homo sapiens
cagagaacaggaaac

SEQ ID NO: 1891246 - DNA, 15 bp, Homo sapiens
agagaacaggaaacc

SEQ ID NO: 1891247 - DNA, 15 bp, Homo sapiens
gagaacaggaaacca

SEQ ID NO: 1891248 - DNA, 15 bp, Homo sapiens
agaacaggaaaccag

SEQ ID NO: 1891249 - DNA, 15 bp, Homo sapiens
gaacaggaaaccagc

SEQ ID NO: 1891250 - DNA, 15 bp, Homo sapiens
aacaggaaaccagcc

SEQ ID NO: 1891251 - DNA, 15 bp, Homo sapiens
acaggaaaccagcct

SEQ ID NO: 1891252 - DNA, 15 bp, Homo sapiens
caggaaaccagcctc

SEQ ID NO: 1891253 - DNA, 15 bp, Homo sapiens
aggaaaccagcctct

SEQ ID NO: 1891254 - DNA, 15 bp, Homo sapiens
ggaaaccagcctctg

SEQ ID NO: 1891255 - DNA, 15 bp, Homo sapiens
gaaaccagcctctgc

SEQ ID NO: 1891256 - DNA, 15 bp, Homo sapiens
aaaccagcctctgct

SEQ ID NO: 1891257 - DNA, 15 bp, Homo sapiens
aaccagcctctgctg

SEQ ID NO: 1891258 - DNA, 15 bp, Homo sapiens
accagcctctgctgt

SEQ ID NO: 1891259 - DNA, 15 bp, Homo sapiens
ccagcctctgctgta

SEQ ID NO: 1891260 - DNA, 15 bp, Homo sapiens
cagcctctgctgtat

SEQ ID NO: 1891261 - DNA, 15 bp, Homo sapiens
agcctctgctgtatc

SEQ ID NO: 1891262 - DNA, 15 bp, Homo sapiens
gcctctgctgtatca

SEQ ID NO: 1891263 - DNA, 15 bp, Homo sapiens
cctctgctgtatcag

SEQ ID NO: 1891264 - DNA, 15 bp, Homo sapiens
ctctgctgtatcaga

SEQ ID NO: 1891265 - DNA, 15 bp, Homo sapiens
tctgctgtatcagac

SEQ ID NO: 1891266 - DNA, 15 bp, Homo sapiens
ctgctgtatcagaca

SEQ ID NO: 1891267 - DNA, 15 bp, Homo sapiens
tgctgtatcagacag

SEQ ID NO: 1891268 - DNA, 15 bp, Homo sapiens
gctgtatcagacagg

SEQ ID NO: 1891269 - DNA, 15 bp, Homo sapiens
ctgtatcagacaggt

SEQ ID NO: 1891270 - DNA, 15 bp, Homo sapiens
tgtatcagacaggtt

SEQ ID NO: 1891271 - DNA, 15 bp, Homo sapiens
gtatcagacaggttt

SEQ ID NO: 1891272 - DNA, 15 bp, Homo sapiens
tatcagacaggtttg

SEQ ID NO: 1891273 - DNA, 15 bp, Homo sapiens
atcagacaggtttgc

SEQ ID NO: 1891274 - DNA, 15 bp, Homo sapiens
tcagacaggtttgct

SEQ ID NO: 1891275 - DNA, 15 bp, Homo sapiens
cagacaggtttgctg

SEQ ID NO: 1891276 - DNA, 15 bp, Homo sapiens
agacaggtttgctgt

SEQ ID NO: 1891277 - DNA, 15 bp, Homo sapiens
gacaggtttgctgtt

SEQ ID NO: 1891278 - DNA, 15 bp, Homo sapiens
acaggtttgctgtta

SEQ ID NO: 1891279 - DNA, 15 bp, Homo sapiens
caggtttgctgttaa

SEQ ID NO: 1891280 - DNA, 15 bp, Homo sapiens
aggtttgctgttaag

SEQ ID NO: 1891281 - DNA, 15 bp, Homo sapiens
ggtttgctgttaagt

SEQ ID NO: 1891282 - DNA, 15 bp, Homo sapiens
gtttgctgttaagtg

SEQ ID NO: 1891283 - DNA, 15 bp, Homo sapiens
tttgctgttaagtgt

SEQ ID NO: 1891284 - DNA, 15 bp, Homo sapiens
ttgctgttaagtgtg

SEQ ID NO: 1891285 - DNA, 15 bp, Homo sapiens
tgctgttaagtgtgt

SEQ ID NO: 1891286 - DNA, 15 bp, Homo sapiens
gctgttaagtgtgtg

SEQ ID NO: 1891287 - DNA, 15 bp, Homo sapiens
ctgttaagtgtgtgt

SEQ ID NO: 1891288 - DNA, 15 bp, Homo sapiens
tgttaagtgtgtgta

SEQ ID NO: 1891289 - DNA, 15 bp, Homo sapiens
gttaagtgtgtgtac

SEQ ID NO: 1891290 - DNA, 15 bp, Homo sapiens
ttaagtgtgtgtaca

SEQ ID NO: 1891291 - DNA, 15 bp, Homo sapiens
taagtgtgtgtacac

SEQ ID NO: 1891292 - DNA, 15 bp, Homo sapiens
aagtgtgtgtacact

SEQ ID NO: 1891293 - DNA, 15 bp, Homo sapiens
agtgtgtgtacactt

SEQ ID NO: 1891294 - DNA, 15 bp, Homo sapiens
gtgtgtgtacacttc

SEQ ID NO: 1891295 - DNA, 15 bp, Homo sapiens
tgtgtgtacacttca

SEQ ID NO: 1891296 - DNA, 15 bp, Homo sapiens
gtgtgtacacttcaa

SEQ ID NO: 1891297 - DNA, 15 bp, Homo sapiens
tgtgtacacttcaag

SEQ ID NO: 1891298 - DNA, 15 bp, Homo sapiens
gtgtacacttcaaga

SEQ ID NO: 1891299 - DNA, 15 bp, Homo sapiens
tgtacacttcaagac

SEQ ID NO: 1891300 - DNA, 15 bp, Homo sapiens
gtacacttcaagacc

SEQ ID NO: 1891301 - DNA, 15 bp, Homo sapiens
tacacttcaagacca

SEQ ID NO: 1891302 - DNA, 15 bp, Homo sapiens
acacttcaagaccaa

SEQ ID NO: 1891303 - DNA, 15 bp, Homo sapiens
cacttcaagaccaaa

SEQ ID NO: 1891304 - DNA, 15 bp, Homo sapiens
acttcaagaccaaag

SEQ ID NO: 1891305 - DNA, 15 bp, Homo sapiens
cttcaagaccaaagt

SEQ ID NO: 1891306 - DNA, 15 bp, Homo sapiens
ttcaagaccaaagta

SEQ ID NO: 1891307 - DNA, 15 bp, Homo sapiens
tcaagaccaaagtaa

SEQ ID NO: 1891308 - DNA, 15 bp, Homo sapiens
caagaccaaagtaat

SEQ ID NO: 1891309 - DNA, 15 bp, Homo sapiens
aagaccaaagtaatt

SEQ ID NO: 1891310 - DNA, 15 bp, Homo sapiens
agaccaaagtaattt

SEQ ID NO: 1891311 - DNA, 15 bp, Homo sapiens
gaccaaagtaatttt

SEQ ID NO: 1891312 - DNA, 15 bp, Homo sapiens
accaaagtaattttc

SEQ ID NO: 1891313 - DNA, 15 bp, Homo sapiens
ccaaagtaattttct

SEQ ID NO: 1891314 - DNA, 15 bp, Homo sapiens
caaagtaattttctt

SEQ ID NO: 1891315 - DNA, 15 bp, Homo sapiens
aaagtaattttcttt

SEQ ID NO: 1891316 - DNA, 15 bp, Homo sapiens
aagtaattttctttc

SEQ ID NO: 1891317 - DNA, 15 bp, Homo sapiens
agtaattttctttca

SEQ ID NO: 1891318 - DNA, 15 bp, Homo sapiens
gtaattttctttcat

SEQ ID NO: 1891319 - DNA, 15 bp, Homo sapiens
taattttctttcatt

SEQ ID NO: 1891320 - DNA, 15 bp, Homo sapiens
aattttctttcattc

SEQ ID NO: 1891321 - DNA, 15 bp, Homo sapiens
attttctttcattct

SEQ ID NO: 1891322 - DNA, 15 bp, Homo sapiens
ttttctttcattctt

SEQ ID NO: 1891323 - DNA, 15 bp, Homo sapiens
tttctttcattcttt

SEQ ID NO: 1891324 - DNA, 15 bp, Homo sapiens
ttctttcattctttt

SEQ ID NO: 1891325 - DNA, 15 bp, Homo sapiens
tctttcattcttttt

SEQ ID NO: 1891326 - DNA, 15 bp, Homo sapiens
ctttcattctttttt

SEQ ID NO: 1891327 - DNA, 15 bp, Homo sapiens
tttcattctttttta

SEQ ID NO: 1891328 - DNA, 15 bp, Homo sapiens
ttcattcttttttat

SEQ ID NO: 1891329 - DNA, 15 bp, Homo sapiens
tcattcttttttatc

SEQ ID NO: 1891330 - DNA, 15 bp, Homo sapiens
cattcttttttatcc

SEQ ID NO: 1891331 - DNA, 15 bp, Homo sapiens
attcttttttatcct

SEQ ID NO: 1891332 - DNA, 15 bp, Homo sapiens
ttcttttttatcctg

SEQ ID NO: 1891333 - DNA, 15 bp, Homo sapiens
tcttttttatcctgt

SEQ ID NO: 1891334 - DNA, 15 bp, Homo sapiens
cttttttatcctgta

SEQ ID NO: 1891335 - DNA, 15 bp, Homo sapiens
ttttttatcctgtag

SEQ ID NO: 1891336 - DNA, 15 bp, Homo sapiens
tttttatcctgtaga

SEQ ID NO: 1891337 - DNA, 15 bp, Homo sapiens
ttttatcctgtagat

SEQ ID NO: 1891338 - DNA, 15 bp, Homo sapiens
tttatcctgtagatc

SEQ ID NO: 1891339 - DNA, 15 bp, Homo sapiens
ttatcctgtagatcg

SEQ ID NO: 1891340 - DNA, 15 bp, Homo sapiens
tatcctgtagatcgc

SEQ ID NO: 1891341 - DNA, 15 bp, Homo sapiens
atcctgtagatcgcc

SEQ ID NO: 1891342 - DNA, 15 bp, Homo sapiens
tcctgtagatcgcca

SEQ ID NO: 1891343 - DNA, 15 bp, Homo sapiens
cctgtagatcgccag

SEQ ID NO: 1891344 - DNA, 15 bp, Homo sapiens
ctgtagatcgccagt

SEQ ID NO: 1891345 - DNA, 15 bp, Homo sapiens
tgtagatcgccagta

SEQ ID NO: 1891346 - DNA, 15 bp, Homo sapiens
gtagatcgccagtac

SEQ ID NO: 1891347 - DNA, 15 bp, Homo sapiens
tagatcgccagtacc

SEQ ID NO: 1891348 - DNA, 15 bp, Homo sapiens
agatcgccagtacct

SEQ ID NO: 1891349 - DNA, 15 bp, Homo sapiens
gatcgccagtaccta

SEQ ID NO: 1891350 - DNA, 15 bp, Homo sapiens
atcgccagtacctac

SEQ ID NO: 1891351 - DNA, 15 bp, Homo sapiens
tcgccagtacctact

SEQ ID NO: 1891352 - DNA, 15 bp, Homo sapiens
cgccagtacctactg

SEQ ID NO: 1891353 - DNA, 15 bp, Homo sapiens
gccagtacctactgc

SEQ ID NO: 1891354 - DNA, 15 bp, Homo sapiens
ccagtacctactgca

SEQ ID NO: 1891355 - DNA, 15 bp, Homo sapiens
cagtacctactgcaa

SEQ ID NO: 1891356 - DNA, 15 bp, Homo sapiens
agtacctactgcaac

SEQ ID NO: 1891357 - DNA, 15 bp, Homo sapiens
gtacctactgcaaca

SEQ ID NO: 1891358 - DNA, 15 bp, Homo sapiens
tacctactgcaacat

SEQ ID NO: 1891359 - DNA, 15 bp, Homo sapiens
acctactgcaacatc

SEQ ID NO: 1891360 - DNA, 15 bp, Homo sapiens
cctactgcaacatct

SEQ ID NO: 1891361 - DNA, 15 bp, Homo sapiens
ctactgcaacatctt

SEQ ID NO: 1891362 - DNA, 15 bp, Homo sapiens
tactgcaacatcttt

SEQ ID NO: 1891363 - DNA, 15 bp, Homo sapiens
actgcaacatctttt

SEQ ID NO: 1891364 - DNA, 15 bp, Homo sapiens
ctgcaacatcttttc

SEQ ID NO: 1891365 - DNA, 15 bp, Homo sapiens
tgcaacatcttttct

SEQ ID NO: 1891366 - DNA, 15 bp, Homo sapiens
gcaacatcttttctc

SEQ ID NO: 1891367 - DNA, 15 bp, Homo sapiens
caacatcttttctcc

SEQ ID NO: 1891368 - DNA, 15 bp, Homo sapiens
aacatcttttctccc

SEQ ID NO: 1891369 - DNA, 15 bp, Homo sapiens
acatcttttctccct

SEQ ID NO: 1891370 - DNA, 15 bp, Homo sapiens
catcttttctcccta

SEQ ID NO: 1891371 - DNA, 15 bp, Homo sapiens
atcttttctccctac

SEQ ID NO: 1891372 - DNA, 15 bp, Homo sapiens
tcttttctccctaca

SEQ ID NO: 1891373 - DNA, 15 bp, Homo sapiens
cttttctccctacac

SEQ ID NO: 1891374 - DNA, 15 bp, Homo sapiens
ttttctccctacaca

SEQ ID NO: 1891375 - DNA, 15 bp, Homo sapiens
tttctccctacacag

SEQ ID NO: 1891376 - DNA, 15 bp, Homo sapiens
ttctccctacacagc

SEQ ID NO: 1891377 - DNA, 15 bp, Homo sapiens
tctccctacacagcg

SEQ ID NO: 1891378 - DNA, 15 bp, Homo sapiens
ctccctacacagcga

SEQ ID NO: 1891379 - DNA, 15 bp, Homo sapiens
tccctacacagcgac

SEQ ID NO: 1891380 - DNA, 15 bp, Homo sapiens
ccctacacagcgact

SEQ ID NO: 1891381 - DNA, 15 bp, Homo sapiens
cctacacagcgactc

SEQ ID NO: 1891382 - DNA, 15 bp, Homo sapiens
ctacacagcgactcc

SEQ ID NO: 1891383 - DNA, 15 bp, Homo sapiens
tacacagcgactcca

SEQ ID NO: 1891384 - DNA, 15 bp, Homo sapiens
acacagcgactccag

SEQ ID NO: 1891385 - DNA, 15 bp, Homo sapiens
cacagcgactccagc

SEQ ID NO: 1891386 - DNA, 15 bp, Homo sapiens
acagcgactccagct

SEQ ID NO: 1891387 - DNA, 15 bp, Homo sapiens
cagcgactccagctt

SEQ ID NO: 1891388 - DNA, 15 bp, Homo sapiens
agcgactccagcttg

SEQ ID NO: 1891389 - DNA, 15 bp, Homo sapiens
gcgactccagcttgg

SEQ ID NO: 1891390 - DNA, 15 bp, Homo sapiens
cgactccagcttggg

SEQ ID NO: 1891391 - DNA, 15 bp, Homo sapiens
gactccagcttggga

SEQ ID NO: 1891392 - DNA, 15 bp, Homo sapiens
actccagcttgggag

SEQ ID NO: 1891393 - DNA, 15 bp, Homo sapiens
ctccagcttgggagg

SEQ ID NO: 1891394 - DNA, 15 bp, Homo sapiens
tccagcttgggaggg

SEQ ID NO: 1891395 - DNA, 15 bp, Homo sapiens
ccagcttgggagggc

SEQ ID NO: 1891396 - DNA, 15 bp, Homo sapiens
cagcttgggagggca

SEQ ID NO: 1891397 - DNA, 15 bp, Homo sapiens
agcttgggagggcag

SEQ ID NO: 1891398 - DNA, 15 bp, Homo sapiens
gcttgggagggcagg

SEQ ID NO: 1891399 - DNA, 15 bp, Homo sapiens
cttgggagggcaggg

SEQ ID NO: 1891400 - DNA, 15 bp, Homo sapiens
ttgggagggcagggc

SEQ ID NO: 1891401 - DNA, 15 bp, Homo sapiens
tgggagggcagggcc

SEQ ID NO: 1891402 - DNA, 15 bp, Homo sapiens
gggagggcagggcca

SEQ ID NO: 1891403 - DNA, 15 bp, Homo sapiens
ggagggcagggccag

SEQ ID NO: 1891404 - DNA, 15 bp, Homo sapiens
gagggcagggccagg

SEQ ID NO: 1891405 - DNA, 15 bp, Homo sapiens
gggcagggccagggt

SEQ ID NO: 1891406 - DNA, 15 bp, Homo sapiens
ggcagggccagggtt

SEQ ID NO: 1891407 - DNA, 15 bp, Homo sapiens
gcagggccagggttg

SEQ ID NO: 1891408 - DNA, 15 bp, Homo sapiens
cagggccagggttgt

SEQ ID NO: 1891409 - DNA, 15 bp, Homo sapiens
agggccagggttgtc

SEQ ID NO: 1891410 - DNA, 15 bp, Homo sapiens
gggccagggttgtca

SEQ ID NO: 1891411 - DNA, 15 bp, Homo sapiens
ggccagggttgtcac

SEQ ID NO: 1891412 - DNA, 15 bp, Homo sapiens
gccagggttgtcaca

SEQ ID NO: 1891413 - DNA, 15 bp, Homo sapiens
ccagggttgtcacag

SEQ ID NO: 1891414 - DNA, 15 bp, Homo sapiens
cagggttgtcacagc

SEQ ID NO: 1891415 - DNA, 15 bp, Homo sapiens
agggttgtcacagct

SEQ ID NO: 1891416 - DNA, 15 bp, Homo sapiens
gggttgtcacagctt

SEQ ID NO: 1891417 - DNA, 15 bp, Homo sapiens
ggttgtcacagcttc

SEQ ID NO: 1891418 - DNA, 15 bp, Homo sapiens
gttgtcacagcttcc

SEQ ID NO: 1891419 - DNA, 15 bp, Homo sapiens
ttgtcacagcttccc

SEQ ID NO: 1891420 - DNA, 15 bp, Homo sapiens
tgtcacagcttcccc

SEQ ID NO: 1891421 - DNA, 15 bp, Homo sapiens
gtcacagcttcccct

SEQ ID NO: 1891422 - DNA, 15 bp, Homo sapiens
tcacagcttcccctg

SEQ ID NO: 1891423 - DNA, 15 bp, Homo sapiens
cacagcttcccctgt

SEQ ID NO: 1891424 - DNA, 15 bp, Homo sapiens
acagcttcccctgtg

SEQ ID NO: 1891425 - DNA, 15 bp, Homo sapiens
cagcttcccctgtgg

SEQ ID NO: 1891426 - DNA, 15 bp, Homo sapiens
agcttcccctgtggt

SEQ ID NO: 1891427 - DNA, 15 bp, Homo sapiens
gcttcccctgtggtg

SEQ ID NO: 1891428 - DNA, 15 bp, Homo sapiens
cttcccctgtggtgt

SEQ ID NO: 1891429 - DNA, 15 bp, Homo sapiens
ttcccctgtggtgtc

SEQ ID NO: 1891430 - DNA, 15 bp, Homo sapiens
tcccctgtggtgtct

SEQ ID NO: 1891431 - DNA, 15 bp, Homo sapiens
cccctgtggtgtctg

SEQ ID NO: 1891432 - DNA, 15 bp, Homo sapiens
ccctgtggtgtctgc

SEQ ID NO: 1891433 - DNA, 15 bp, Homo sapiens
cctgtggtgtctgcc

SEQ ID NO: 1891434 - DNA, 15 bp, Homo sapiens
ctgtggtgtctgcct

SEQ ID NO: 1891435 - DNA, 15 bp, Homo sapiens
tgtggtgtctgcctg

SEQ ID NO: 1891436 - DNA, 15 bp, Homo sapiens
gtggtgtctgcctgc

SEQ ID NO: 1891437 - DNA, 15 bp, Homo sapiens
tggtgtctgcctgcc

SEQ ID NO: 1891438 - DNA, 15 bp, Homo sapiens
ggtgtctgcctgcca

SEQ ID NO: 1891439 - DNA, 15 bp, Homo sapiens
gtgtctgcctgccaa

SEQ ID NO: 1891440 - DNA, 15 bp, Homo sapiens
tgtctgcctgccaag

SEQ ID NO: 1891441 - DNA, 15 bp, Homo sapiens
gtctgcctgccaagc

SEQ ID NO: 1891442 - DNA, 15 bp, Homo sapiens
tctgcctgccaagca

SEQ ID NO: 1891443 - DNA, 15 bp, Homo sapiens
ctgcctgccaagcac

SEQ ID NO: 1891444 - DNA, 15 bp, Homo sapiens
tgcctgccaagcaca

SEQ ID NO: 1891445 - DNA, 15 bp, Homo sapiens
gcctgccaagcacag

SEQ ID NO: 1891446 - DNA, 15 bp, Homo sapiens
cctgccaagcacagc

SEQ ID NO: 1891447 - DNA, 15 bp, Homo sapiens
ctgccaagcacagct

SEQ ID NO: 1891448 - DNA, 15 bp, Homo sapiens
tgccaagcacagctc

SEQ ID NO: 1891449 - DNA, 15 bp, Homo sapiens
gccaagcacagctct

SEQ ID NO: 1891450 - DNA, 15 bp, Homo sapiens
ccaagcacagctctg

SEQ ID NO: 1891451 - DNA, 15 bp, Homo sapiens
caagcacagctctgg

SEQ ID NO: 1891452 - DNA, 15 bp, Homo sapiens
aagcacagctctgga

SEQ ID NO: 1891453 - DNA, 15 bp, Homo sapiens
agcacagctctggag

SEQ ID NO: 1891454 - DNA, 15 bp, Homo sapiens
gcacagctctggagt

SEQ ID NO: 1891455 - DNA, 15 bp, Homo sapiens
cacagctctggagtt

SEQ ID NO: 1891456 - DNA, 15 bp, Homo sapiens
acagctctggagtta

SEQ ID NO: 1891457 - DNA, 15 bp, Homo sapiens
cagctctggagttag

SEQ ID NO: 1891458 - DNA, 15 bp, Homo sapiens
agctctggagttagc

SEQ ID NO: 1891459 - DNA, 15 bp, Homo sapiens
gctctggagttagcc

SEQ ID NO: 1891460 - DNA, 15 bp, Homo sapiens
ctctggagttagccc

SEQ ID NO: 1891461 - DNA, 15 bp, Homo sapiens
tctggagttagccct

SEQ ID NO: 1891462 - DNA, 15 bp, Homo sapiens
ctggagttagccctg

SEQ ID NO: 1891463 - DNA, 15 bp, Homo sapiens
tggagttagccctgg

SEQ ID NO: 1891464 - DNA, 15 bp, Homo sapiens
ggagttagccctggg

SEQ ID NO: 1891465 - DNA, 15 bp, Homo sapiens
gagttagccctgggt

SEQ ID NO: 1891466 - DNA, 15 bp, Homo sapiens
agttagccctgggtg

SEQ ID NO: 1891467 - DNA, 15 bp, Homo sapiens
gttagccctgggtgt

SEQ ID NO: 1891468 - DNA, 15 bp, Homo sapiens
ttagccctgggtgtg

SEQ ID NO: 1891469 - DNA, 15 bp, Homo sapiens
tagccctgggtgtga

SEQ ID NO: 1891470 - DNA, 15 bp, Homo sapiens
agccctgggtgtgag

SEQ ID NO: 1891471 - DNA, 15 bp, Homo sapiens
gccctgggtgtgagg

SEQ ID NO: 1891472 - DNA, 15 bp, Homo sapiens
ccctgggtgtgaggt

SEQ ID NO: 1891473 - DNA, 15 bp, Homo sapiens
cctgggtgtgaggtg

SEQ ID NO: 1891474 - DNA, 15 bp, Homo sapiens
ctgggtgtgaggtga

SEQ ID NO: 1891475 - DNA, 15 bp, Homo sapiens
tgggtgtgaggtgag

SEQ ID NO: 1891476 - DNA, 15 bp, Homo sapiens
gggtgtgaggtgaga

SEQ ID NO: 1891477 - DNA, 15 bp, Homo sapiens
ggtgtgaggtgagaa

SEQ ID NO: 1891478 - DNA, 15 bp, Homo sapiens
gtgtgaggtgagaaa

SEQ ID NO: 1891479 - DNA, 15 bp, Homo sapiens
tgtgaggtgagaaag

SEQ ID NO: 1891480 - DNA, 15 bp, Homo sapiens
gtgaggtgagaaaga

SEQ ID NO: 1891481 - DNA, 15 bp, Homo sapiens
tgaggtgagaaagag

SEQ ID NO: 1891482 - DNA, 15 bp, Homo sapiens
gaggtgagaaagaga

SEQ ID NO: 1891483 - DNA, 15 bp, Homo sapiens
aggtgagaaagagat

SEQ ID NO: 1891484 - DNA, 15 bp, Homo sapiens
ggtgagaaagagatt

SEQ ID NO: 1891485 - DNA, 15 bp, Homo sapiens
gtgagaaagagattg

SEQ ID NO: 1891486 - DNA, 15 bp, Homo sapiens
tgagaaagagattgc

SEQ ID NO: 1891487 - DNA, 15 bp, Homo sapiens
gagaaagagattgca

SEQ ID NO: 1891488 - DNA, 15 bp, Homo sapiens
agaaagagattgcat

SEQ ID NO: 1891489 - DNA, 15 bp, Homo sapiens
gaaagagattgcatg

SEQ ID NO: 1891490 - DNA, 15 bp, Homo sapiens
aaagagattgcatgg

SEQ ID NO: 1891491 - DNA, 15 bp, Homo sapiens
aagagattgcatggt

SEQ ID NO: 1891492 - DNA, 15 bp, Homo sapiens
agagattgcatggtc

SEQ ID NO: 1891493 - DNA, 15 bp, Homo sapiens
gagattgcatggtct

SEQ ID NO: 1891494 - DNA, 15 bp, Homo sapiens
agattgcatggtctg

SEQ ID NO: 1891495 - DNA, 15 bp, Homo sapiens
gattgcatggtctgg

SEQ ID NO: 1891496 - DNA, 15 bp, Homo sapiens
attgcatggtctggt

SEQ ID NO: 1891497 - DNA, 15 bp, Homo sapiens
ttgcatggtctggtt

SEQ ID NO: 1891498 - DNA, 15 bp, Homo sapiens
tgcatggtctggttt

SEQ ID NO: 1891499 - DNA, 15 bp, Homo sapiens
gcatggtctggtttt

SEQ ID NO: 1891500 - DNA, 15 bp, Homo sapiens
catggtctggttttt

SEQ ID NO: 1891501 - DNA, 15 bp, Homo sapiens
atggtctggtttttt

SEQ ID NO: 1891502 - DNA, 15 bp, Homo sapiens
tggtctggttttttt

SEQ ID NO: 1891503 - DNA, 15 bp, Homo sapiens
ggtctggtttttttc

SEQ ID NO: 1891504 - DNA, 15 bp, Homo sapiens
gtctggtttttttca

SEQ ID NO: 1891505 - DNA, 15 bp, Homo sapiens
tctggtttttttcat

SEQ ID NO: 1891506 - DNA, 15 bp, Homo sapiens
ctggtttttttcatt

SEQ ID NO: 1891507 - DNA, 15 bp, Homo sapiens
tggtttttttcattc

SEQ ID NO: 1891508 - DNA, 15 bp, Homo sapiens
ggtttttttcattca

SEQ ID NO: 1891509 - DNA, 15 bp, Homo sapiens
gtttttttcattcac

SEQ ID NO: 1891510 - DNA, 15 bp, Homo sapiens
tttttttcattcact

SEQ ID NO: 1891511 - DNA, 15 bp, Homo sapiens
ttttttcattcactt

SEQ ID NO: 1891512 - DNA, 15 bp, Homo sapiens
ttttcattcacttgg

SEQ ID NO: 1891513 - DNA, 15 bp, Homo sapiens
tttcattcacttggg

SEQ ID NO: 1891514 - DNA, 15 bp, Homo sapiens
ttcattcacttgggc

SEQ ID NO: 1891515 - DNA, 15 bp, Homo sapiens
tcattcacttgggca

SEQ ID NO: 1891516 - DNA, 15 bp, Homo sapiens
cattcacttgggcag

SEQ ID NO: 1891517 - DNA, 15 bp, Homo sapiens
attcacttgggcagg

SEQ ID NO: 1891518 - DNA, 15 bp, Homo sapiens
ttcacttgggcaggt

SEQ ID NO: 1891519 - DNA, 15 bp, Homo sapiens
tcacttgggcaggtg

SEQ ID NO: 1891520 - DNA, 15 bp, Homo sapiens
cacttgggcaggtgt

SEQ ID NO: 1891521 - DNA, 15 bp, Homo sapiens
acttgggcaggtgtc

SEQ ID NO: 1891522 - DNA, 15 bp, Homo sapiens
cttgggcaggtgtct

SEQ ID NO: 1891523 - DNA, 15 bp, Homo sapiens
ttgggcaggtgtctt

SEQ ID NO: 1891524 - DNA, 15 bp, Homo sapiens
tgggcaggtgtcttg

SEQ ID NO: 1891525 - DNA, 15 bp, Homo sapiens
gggcaggtgtcttgc

SEQ ID NO: 1891526 - DNA, 15 bp, Homo sapiens
ggcaggtgtcttgcc

SEQ ID NO: 1891527 - DNA, 15 bp, Homo sapiens
gcaggtgtcttgccc

SEQ ID NO: 1891528 - DNA, 15 bp, Homo sapiens
caggtgtcttgcccg

SEQ ID NO: 1891529 - DNA, 15 bp, Homo sapiens
aggtgtcttgcccgc

SEQ ID NO: 1891530 - DNA, 15 bp, Homo sapiens
ggtgtcttgcccgca

SEQ ID NO: 1891531 - DNA, 15 bp, Homo sapiens
gtgtcttgcccgcag

SEQ ID NO: 1891532 - DNA, 15 bp, Homo sapiens
tgtcttgcccgcagt

SEQ ID NO: 1891533 - DNA, 15 bp, Homo sapiens
gtcttgcccgcagtt

SEQ ID NO: 1891534 - DNA, 15 bp, Homo sapiens
tcttgcccgcagttt

SEQ ID NO: 1891535 - DNA, 15 bp, Homo sapiens
cttgcccgcagtttg

SEQ ID NO: 1891536 - DNA, 15 bp, Homo sapiens
ttgcccgcagtttgg

SEQ ID NO: 1891537 - DNA, 15 bp, Homo sapiens
tgcccgcagtttggg

SEQ ID NO: 1891538 - DNA, 15 bp, Homo sapiens
gcccgcagtttgggc

SEQ ID NO: 1891539 - DNA, 15 bp, Homo sapiens
cccgcagtttgggca

SEQ ID NO: 1891540 - DNA, 15 bp, Homo sapiens
ccgcagtttgggcat

SEQ ID NO: 1891541 - DNA, 15 bp, Homo sapiens
cgcagtttgggcatg

SEQ ID NO: 1891542 - DNA, 15 bp, Homo sapiens
gcagtttgggcatgc

SEQ ID NO: 1891543 - DNA, 15 bp, Homo sapiens
cagtttgggcatgca

SEQ ID NO: 1891544 - DNA, 15 bp, Homo sapiens
agtttgggcatgcac

SEQ ID NO: 1891545 - DNA, 15 bp, Homo sapiens
gtttgggcatgcaca

SEQ ID NO: 1891546 - DNA, 15 bp, Homo sapiens
tttgggcatgcacac

SEQ ID NO: 1891547 - DNA, 15 bp, Homo sapiens
ttgggcatgcacaca

SEQ ID NO: 1891548 - DNA, 15 bp, Homo sapiens
tgggcatgcacacac

SEQ ID NO: 1891549 - DNA, 15 bp, Homo sapiens
gggcatgcacacacc

SEQ ID NO: 1891550 - DNA, 15 bp, Homo sapiens
ggcatgcacacaccc

SEQ ID NO: 1891551 - DNA, 15 bp, Homo sapiens
gcatgcacacaccct

SEQ ID NO: 1891552 - DNA, 15 bp, Homo sapiens
catgcacacaccctc

SEQ ID NO: 1891553 - DNA, 15 bp, Homo sapiens
atgcacacaccctct

SEQ ID NO: 1891554 - DNA, 15 bp, Homo sapiens
tgcacacaccctctg

SEQ ID NO: 1891555 - DNA, 15 bp, Homo sapiens
gcacacaccctctgc

SEQ ID NO: 1891556 - DNA, 15 bp, Homo sapiens
cacacaccctctgcc

SEQ ID NO: 1891557 - DNA, 15 bp, Homo sapiens
acacaccctctgccg

SEQ ID NO: 1891558 - DNA, 15 bp, Homo sapiens
cacaccctctgccgg

SEQ ID NO: 1891559 - DNA, 15 bp, Homo sapiens
acaccctctgccgga

SEQ ID NO: 1891560 - DNA, 15 bp, Homo sapiens
caccctctgccggaa

SEQ ID NO: 1891561 - DNA, 15 bp, Homo sapiens
accctctgccggaat

SEQ ID NO: 1891562 - DNA, 15 bp, Homo sapiens
ccctctgccggaatg

SEQ ID NO: 1891563 - DNA, 15 bp, Homo sapiens
cctctgccggaatgg

SEQ ID NO: 1891564 - DNA, 15 bp, Homo sapiens
ctctgccggaatggc

SEQ ID NO: 1891565 - DNA, 15 bp, Homo sapiens
tctgccggaatggcc

SEQ ID NO: 1891566 - DNA, 15 bp, Homo sapiens
ctgccggaatggccc

SEQ ID NO: 1891567 - DNA, 15 bp, Homo sapiens
tgccggaatggcccc

SEQ ID NO: 1891568 - DNA, 15 bp, Homo sapiens
gccggaatggcccca

SEQ ID NO: 1891569 - DNA, 15 bp, Homo sapiens
ccggaatggccccaa

SEQ ID NO: 1891570 - DNA, 15 bp, Homo sapiens
cggaatggccccaag

SEQ ID NO: 1891571 - DNA, 15 bp, Homo sapiens
ggaatggccccaagc

SEQ ID NO: 1891572 - DNA, 15 bp, Homo sapiens
gaatggccccaagca

SEQ ID NO: 1891573 - DNA, 15 bp, Homo sapiens
aatggccccaagcag

SEQ ID NO: 1891574 - DNA, 15 bp, Homo sapiens
atggccccaagcagg

SEQ ID NO: 1891575 - DNA, 15 bp, Homo sapiens
tggccccaagcaggc

SEQ ID NO: 1891576 - DNA, 15 bp, Homo sapiens
ggccccaagcaggct

SEQ ID NO: 1891577 - DNA, 15 bp, Homo sapiens
gccccaagcaggctc

SEQ ID NO: 1891578 - DNA, 15 bp, Homo sapiens
ccccaagcaggctcg

SEQ ID NO: 1891579 - DNA, 15 bp, Homo sapiens
cccaagcaggctcgc

SEQ ID NO: 1891580 - DNA, 15 bp, Homo sapiens
ccaagcaggctcgcc

SEQ ID NO: 1891581 - DNA, 15 bp, Homo sapiens
caagcaggctcgcct

SEQ ID NO: 1891582 - DNA, 15 bp, Homo sapiens
aagcaggctcgcctg

SEQ ID NO: 1891583 - DNA, 15 bp, Homo sapiens
agcaggctcgcctgc

SEQ ID NO: 1891584 - DNA, 15 bp, Homo sapiens
gcaggctcgcctgct

SEQ ID NO: 1891585 - DNA, 15 bp, Homo sapiens
caggctcgcctgctg

SEQ ID NO: 1891586 - DNA, 15 bp, Homo sapiens
aggctcgcctgctgc

SEQ ID NO: 1891587 - DNA, 15 bp, Homo sapiens
ggctcgcctgctgct

SEQ ID NO: 1891588 - DNA, 15 bp, Homo sapiens
gctcgcctgctgctg

SEQ ID NO: 1891589 - DNA, 15 bp, Homo sapiens
ctcgcctgctgctga

SEQ ID NO: 1891590 - DNA, 15 bp, Homo sapiens
tcgcctgctgctgaa

SEQ ID NO: 1891591 - DNA, 15 bp, Homo sapiens
cgcctgctgctgaag

SEQ ID NO: 1891592 - DNA, 15 bp, Homo sapiens
gcctgctgctgaagc

SEQ ID NO: 1891593 - DNA, 15 bp, Homo sapiens
cctgctgctgaagct

SEQ ID NO: 1891594 - DNA, 15 bp, Homo sapiens
ctgctgctgaagctg

SEQ ID NO: 1891595 - DNA, 15 bp, Homo sapiens
tgctgctgaagctgc

SEQ ID NO: 1891596 - DNA, 15 bp, Homo sapiens
gctgctgaagctgca

SEQ ID NO: 1891597 - DNA, 15 bp, Homo sapiens
ctgctgaagctgcaa

SEQ ID NO: 1891598 - DNA, 15 bp, Homo sapiens
tgctgaagctgcaac

SEQ ID NO: 1891599 - DNA, 15 bp, Homo sapiens
gctgaagctgcaacg

SEQ ID NO: 1891600 - DNA, 15 bp, Homo sapiens
ctgaagctgcaacga

SEQ ID NO: 1891601 - DNA, 15 bp, Homo sapiens
tgaagctgcaacgat

SEQ ID NO: 1891602 - DNA, 15 bp, Homo sapiens
gaagctgcaacgatt

SEQ ID NO: 1891603 - DNA, 15 bp, Homo sapiens
aagctgcaacgattt

SEQ ID NO: 1891604 - DNA, 15 bp, Homo sapiens
agctgcaacgattta

SEQ ID NO: 1891605 - DNA, 15 bp, Homo sapiens
gctgcaacgatttaa

SEQ ID NO: 1891606 - DNA, 15 bp, Homo sapiens
ctgcaacgatttaac

SEQ ID NO: 1891607 - DNA, 15 bp, Homo sapiens
tgcaacgatttaacc

SEQ ID NO: 1891608 - DNA, 15 bp, Homo sapiens
gcaacgatttaacct

SEQ ID NO: 1891609 - DNA, 15 bp, Homo sapiens
caacgatttaacctc

SEQ ID NO: 1891610 - DNA, 15 bp, Homo sapiens
aacgatttaacctcc

SEQ ID NO: 1891611 - DNA, 15 bp, Homo sapiens
acgatttaacctcca

SEQ ID NO: 1891612 - DNA, 15 bp, Homo sapiens
cgatttaacctccat

SEQ ID NO: 1891613 - DNA, 15 bp, Homo sapiens
gatttaacctccatc

SEQ ID NO: 1891614 - DNA, 15 bp, Homo sapiens
atttaacctccatcg

SEQ ID NO: 1891615 - DNA, 15 bp, Homo sapiens
tttaacctccatcgc

SEQ ID NO: 1891616 - DNA, 15 bp, Homo sapiens
ttaacctccatcgca

SEQ ID NO: 1891617 - DNA, 15 bp, Homo sapiens
taacctccatcgcag

SEQ ID NO: 1891618 - DNA, 15 bp, Homo sapiens
aacctccatcgcagc

SEQ ID NO: 1891619 - DNA, 15 bp, Homo sapiens
acctccatcgcagca

SEQ ID NO: 1891620 - DNA, 15 bp, Homo sapiens
cctccatcgcagcac

SEQ ID NO: 1891621 - DNA, 15 bp, Homo sapiens
ctccatcgcagcact

SEQ ID NO: 1891622 - DNA, 15 bp, Homo sapiens
tccatcgcagcactg

SEQ ID NO: 1891623 - DNA, 15 bp, Homo sapiens
ccatcgcagcactga

SEQ ID NO: 1891624 - DNA, 15 bp, Homo sapiens
catcgcagcactgac

SEQ ID NO: 1891625 - DNA, 15 bp, Homo sapiens
atcgcagcactgaca

SEQ ID NO: 1891626 - DNA, 15 bp, Homo sapiens
tcgcagcactgacat

SEQ ID NO: 1891627 - DNA, 15 bp, Homo sapiens
cgcagcactgacatt

SEQ ID NO: 1891628 - DNA, 15 bp, Homo sapiens
gcagcactgacattg

SEQ ID NO: 1891629 - DNA, 15 bp, Homo sapiens
cagcactgacattgg

SEQ ID NO: 1891630 - DNA, 15 bp, Homo sapiens
agcactgacattggg

SEQ ID NO: 1891631 - DNA, 15 bp, Homo sapiens
gcactgacattgggt

SEQ ID NO: 1891632 - DNA, 15 bp, Homo sapiens
cactgacattgggtg

SEQ ID NO: 1891633 - DNA, 15 bp, Homo sapiens
actgacattgggtgg

SEQ ID NO: 1891634 - DNA, 15 bp, Homo sapiens
ctgacattgggtggg

SEQ ID NO: 1891635 - DNA, 15 bp, Homo sapiens
tgacattgggtggga

SEQ ID NO: 1891636 - DNA, 15 bp, Homo sapiens
gacattgggtgggag

SEQ ID NO: 1891637 - DNA, 15 bp, Homo sapiens
acattgggtgggagg

SEQ ID NO: 1891638 - DNA, 15 bp, Homo sapiens
cattgggtgggaggc

SEQ ID NO: 1891639 - DNA, 15 bp, Homo sapiens
attgggtgggaggcc

SEQ ID NO: 1891640 - DNA, 15 bp, Homo sapiens
ttgggtgggaggcct

SEQ ID NO: 1891641 - DNA, 15 bp, Homo sapiens
tgggtgggaggcctc

SEQ ID NO: 1891642 - DNA, 15 bp, Homo sapiens
gggtgggaggcctcc

SEQ ID NO: 1891643 - DNA, 15 bp, Homo sapiens
ggtgggaggcctcct

SEQ ID NO: 1891644 - DNA, 15 bp, Homo sapiens
gtgggaggcctcctt

SEQ ID NO: 1891645 - DNA, 15 bp, Homo sapiens
tgggaggcctccttt

SEQ ID NO: 1891646 - DNA, 15 bp, Homo sapiens
gggaggcctcctttc

SEQ ID NO: 1891647 - DNA, 15 bp, Homo sapiens
ggaggcctcctttca

SEQ ID NO: 1891648 - DNA, 15 bp, Homo sapiens
gaggcctcctttcaa

SEQ ID NO: 1891649 - DNA, 15 bp, Homo sapiens
aggcctcctttcaaa

SEQ ID NO: 1891650 - DNA, 15 bp, Homo sapiens
ggcctcctttcaaat

SEQ ID NO: 1891651 - DNA, 15 bp, Homo sapiens
gcctcctttcaaatc

SEQ ID NO: 1891652 - DNA, 15 bp, Homo sapiens
cctcctttcaaatcc

SEQ ID NO: 1891653 - DNA, 15 bp, Homo sapiens
ctcctttcaaatcct

SEQ ID NO: 1891654 - DNA, 15 bp, Homo sapiens
tcctttcaaatcctt

SEQ ID NO: 1891655 - DNA, 15 bp, Homo sapiens
cctttcaaatccttc

SEQ ID NO: 1891656 - DNA, 15 bp, Homo sapiens
ctttcaaatccttcc

SEQ ID NO: 1891657 - DNA, 15 bp, Homo sapiens
tttcaaatccttccc

SEQ ID NO: 1891658 - DNA, 15 bp, Homo sapiens
ttcaaatccttccca

SEQ ID NO: 1891659 - DNA, 15 bp, Homo sapiens
tcaaatccttcccag

SEQ ID NO: 1891660 - DNA, 15 bp, Homo sapiens
caaatccttcccagt

SEQ ID NO: 1891661 - DNA, 15 bp, Homo sapiens
aaatccttcccagtt

SEQ ID NO: 1891662 - DNA, 15 bp, Homo sapiens
aatccttcccagttc

SEQ ID NO: 1891663 - DNA, 15 bp, Homo sapiens
atccttcccagttct

SEQ ID NO: 1891664 - DNA, 15 bp, Homo sapiens
tccttcccagttctg

SEQ ID NO: 1891665 - DNA, 15 bp, Homo sapiens
ccttcccagttctgt

SEQ ID NO: 1891666 - DNA, 15 bp, Homo sapiens
cttcccagttctgtt

SEQ ID NO: 1891667 - DNA, 15 bp, Homo sapiens
ttcccagttctgttt

SEQ ID NO: 1891668 - DNA, 15 bp, Homo sapiens
tcccagttctgtttt

SEQ ID NO: 1891669 - DNA, 15 bp, Homo sapiens
cccagttctgttttt

SEQ ID NO: 1891670 - DNA, 15 bp, Homo sapiens
ccagttctgttttta

SEQ ID NO: 1891671 - DNA, 15 bp, Homo sapiens
cagttctgtttttaa

SEQ ID NO: 1891672 - DNA, 15 bp, Homo sapiens
agttctgtttttaac

SEQ ID NO: 1891673 - DNA, 15 bp, Homo sapiens
gttctgtttttaacc

SEQ ID NO: 1891674 - DNA, 15 bp, Homo sapiens
ttctgtttttaacca

SEQ ID NO: 1891675 - DNA, 15 bp, Homo sapiens
tctgtttttaaccaa

SEQ ID NO: 1891676 - DNA, 15 bp, Homo sapiens
ctgtttttaaccaag

SEQ ID NO: 1891677 - DNA, 15 bp, Homo sapiens
tgtttttaaccaagt

SEQ ID NO: 1891678 - DNA, 15 bp, Homo sapiens
gtttttaaccaagtg

SEQ ID NO: 1891679 - DNA, 15 bp, Homo sapiens
tttttaaccaagtgc

SEQ ID NO: 1891680 - DNA, 15 bp, Homo sapiens
ttttaaccaagtgcg

SEQ ID NO: 1891681 - DNA, 15 bp, Homo sapiens
tttaaccaagtgcgc

SEQ ID NO: 1891682 - DNA, 15 bp, Homo sapiens
ttaaccaagtgcgct

SEQ ID NO: 1891683 - DNA, 15 bp, Homo sapiens
taaccaagtgcgctc

SEQ ID NO: 1891684 - DNA, 15 bp, Homo sapiens
aaccaagtgcgctct

SEQ ID NO: 1891685 - DNA, 15 bp, Homo sapiens
accaagtgcgctctt

SEQ ID NO: 1891686 - DNA, 15 bp, Homo sapiens
ccaagtgcgctcttc

SEQ ID NO: 1891687 - DNA, 15 bp, Homo sapiens
caagtgcgctcttct

SEQ ID NO: 1891688 - DNA, 15 bp, Homo sapiens
aagtgcgctcttctg

SEQ ID NO: 1891689 - DNA, 15 bp, Homo sapiens
agtgcgctcttctgt

SEQ ID NO: 1891690 - DNA, 15 bp, Homo sapiens
gtgcgctcttctgta

SEQ ID NO: 1891691 - DNA, 15 bp, Homo sapiens
tgcgctcttctgtaa

SEQ ID NO: 1891692 - DNA, 15 bp, Homo sapiens
gcgctcttctgtaac

SEQ ID NO: 1891693 - DNA, 15 bp, Homo sapiens
cgctcttctgtaacc

SEQ ID NO: 1891694 - DNA, 15 bp, Homo sapiens
gctcttctgtaacct

SEQ ID NO: 1891695 - DNA, 15 bp, Homo sapiens
ctcttctgtaaccta

SEQ ID NO: 1891696 - DNA, 15 bp, Homo sapiens
tcttctgtaacctag

SEQ ID NO: 1891697 - DNA, 15 bp, Homo sapiens
cttctgtaacctagt

SEQ ID NO: 1891698 - DNA, 15 bp, Homo sapiens
ttctgtaacctagtt

SEQ ID NO: 1891699 - DNA, 15 bp, Homo sapiens
tctgtaacctagttt

SEQ ID NO: 1891700 - DNA, 15 bp, Homo sapiens
ctgtaacctagtttt

SEQ ID NO: 1891701 - DNA, 15 bp, Homo sapiens
tgtaacctagttttc

SEQ ID NO: 1891702 - DNA, 15 bp, Homo sapiens
gtaacctagttttct

SEQ ID NO: 1891703 - DNA, 15 bp, Homo sapiens
taacctagttttctc

SEQ ID NO: 1891704 - DNA, 15 bp, Homo sapiens
aacctagttttctct

SEQ ID NO: 1891705 - DNA, 15 bp, Homo sapiens
acctagttttctctt

SEQ ID NO: 1891706 - DNA, 15 bp, Homo sapiens
cctagttttctcttt

SEQ ID NO: 1891707 - DNA, 15 bp, Homo sapiens
ctagttttctctttt

SEQ ID NO: 1891708 - DNA, 15 bp, Homo sapiens
tagttttctcttttt

SEQ ID NO: 1891709 - DNA, 15 bp, Homo sapiens
agttttctctttttc

SEQ ID NO: 1891710 - DNA, 15 bp, Homo sapiens
gttttctctttttcc

SEQ ID NO: 1891711 - DNA, 15 bp, Homo sapiens
ttttctctttttcct

SEQ ID NO: 1891712 - DNA, 15 bp, Homo sapiens
tttctctttttccta

SEQ ID NO: 1891713 - DNA, 15 bp, Homo sapiens
ttctctttttcctac

SEQ ID NO: 1891714 - DNA, 15 bp, Homo sapiens
tctctttttcctaca

SEQ ID NO: 1891715 - DNA, 15 bp, Homo sapiens
ctctttttcctacac

SEQ ID NO: 1891716 - DNA, 15 bp, Homo sapiens
tctttttcctacact

SEQ ID NO: 1891717 - DNA, 15 bp, Homo sapiens
ctttttcctacactg

SEQ ID NO: 1891718 - DNA, 15 bp, Homo sapiens
tttttcctacactgt

SEQ ID NO: 1891719 - DNA, 15 bp, Homo sapiens
ttttcctacactgtc

SEQ ID NO: 1891720 - DNA, 15 bp, Homo sapiens
tttcctacactgtct

SEQ ID NO: 1891721 - DNA, 15 bp, Homo sapiens
ttcctacactgtctg

SEQ ID NO: 1891722 - DNA, 15 bp, Homo sapiens
tcctacactgtctgc

SEQ ID NO: 1891723 - DNA, 15 bp, Homo sapiens
cctacactgtctgcc

SEQ ID NO: 1891724 - DNA, 15 bp, Homo sapiens
ctacactgtctgccc

SEQ ID NO: 1891725 - DNA, 15 bp, Homo sapiens
tacactgtctgccct

SEQ ID NO: 1891726 - DNA, 15 bp, Homo sapiens
acactgtctgccctt

SEQ ID NO: 1891727 - DNA, 15 bp, Homo sapiens
cactgtctgcccttg

SEQ ID NO: 1891728 - DNA, 15 bp, Homo sapiens
actgtctgcccttgt

SEQ ID NO: 1891729 - DNA, 15 bp, Homo sapiens
ctgtctgcccttgtc

SEQ ID NO: 1891730 - DNA, 15 bp, Homo sapiens
tgtctgcccttgtca

SEQ ID NO: 1891731 - DNA, 15 bp, Homo sapiens
gtctgcccttgtcag

SEQ ID NO: 1891732 - DNA, 15 bp, Homo sapiens
tctgcccttgtcagt

SEQ ID NO: 1891733 - DNA, 15 bp, Homo sapiens
ctgcccttgtcagtc

SEQ ID NO: 1891734 - DNA, 15 bp, Homo sapiens
tgcccttgtcagtcc

SEQ ID NO: 1891735 - DNA, 15 bp, Homo sapiens
gcccttgtcagtcct

SEQ ID NO: 1891736 - DNA, 15 bp, Homo sapiens
cccttgtcagtccta

SEQ ID NO: 1891737 - DNA, 15 bp, Homo sapiens
ccttgtcagtcctac

SEQ ID NO: 1891738 - DNA, 15 bp, Homo sapiens
cttgtcagtcctacc

SEQ ID NO: 1891739 - DNA, 15 bp, Homo sapiens
ttgtcagtcctacct

SEQ ID NO: 1891740 - DNA, 15 bp, Homo sapiens
tgtcagtcctacctc

SEQ ID NO: 1891741 - DNA, 15 bp, Homo sapiens
gtcagtcctacctct

SEQ ID NO: 1891742 - DNA, 15 bp, Homo sapiens
tcagtcctacctctt

SEQ ID NO: 1891743 - DNA, 15 bp, Homo sapiens
cagtcctacctcttc

SEQ ID NO: 1891744 - DNA, 15 bp, Homo sapiens
agtcctacctcttcc

SEQ ID NO: 1891745 - DNA, 15 bp, Homo sapiens
gtcctacctcttccc

SEQ ID NO: 1891746 - DNA, 15 bp, Homo sapiens
tcctacctcttcccc

SEQ ID NO: 1891747 - DNA, 15 bp, Homo sapiens
cctacctcttcccct

SEQ ID NO: 1891748 - DNA, 15 bp, Homo sapiens
ctacctcttcccctg

SEQ ID NO: 1891749 - DNA, 15 bp, Homo sapiens
tacctcttcccctga

SEQ ID NO: 1891750 - DNA, 15 bp, Homo sapiens
acctcttcccctgac

SEQ ID NO: 1891751 - DNA, 15 bp, Homo sapiens
cctcttcccctgacc

SEQ ID NO: 1891752 - DNA, 15 bp, Homo sapiens
ctcttcccctgacct

SEQ ID NO: 1891753 - DNA, 15 bp, Homo sapiens
tcttcccctgacctg

SEQ ID NO: 1891754 - DNA, 15 bp, Homo sapiens
cttcccctgacctga

SEQ ID NO: 1891755 - DNA, 15 bp, Homo sapiens
ttcccctgacctgag

SEQ ID NO: 1891756 - DNA, 15 bp, Homo sapiens
tcccctgacctgagc

SEQ ID NO: 1891757 - DNA, 15 bp, Homo sapiens
cccctgacctgagca

SEQ ID NO: 1891758 - DNA, 15 bp, Homo sapiens
ccctgacctgagcag

SEQ ID NO: 1891759 - DNA, 15 bp, Homo sapiens
cctgacctgagcagg

SEQ ID NO: 1891760 - DNA, 15 bp, Homo sapiens
ctgacctgagcaggt

SEQ ID NO: 1891761 - DNA, 15 bp, Homo sapiens
tgacctgagcaggta

SEQ ID NO: 1891762 - DNA, 15 bp, Homo sapiens
gacctgagcaggtac

SEQ ID NO: 1891763 - DNA, 15 bp, Homo sapiens
acctgagcaggtacc

SEQ ID NO: 1891764 - DNA, 15 bp, Homo sapiens
cctgagcaggtacct

SEQ ID NO: 1891765 - DNA, 15 bp, Homo sapiens
ctgagcaggtacctc

SEQ ID NO: 1891766 - DNA, 15 bp, Homo sapiens
tgagcaggtacctcg

SEQ ID NO: 1891767 - DNA, 15 bp, Homo sapiens
gagcaggtacctcgt

SEQ ID NO: 1891768 - DNA, 15 bp, Homo sapiens
agcaggtacctcgta

SEQ ID NO: 1891769 - DNA, 15 bp, Homo sapiens
gcaggtacctcgtag

SEQ ID NO: 1891770 - DNA, 15 bp, Homo sapiens
caggtacctcgtaga

SEQ ID NO: 1891771 - DNA, 15 bp, Homo sapiens
aggtacctcgtagaa

SEQ ID NO: 1891772 - DNA, 15 bp, Homo sapiens
ggtacctcgtagaag

SEQ ID NO: 1891773 - DNA, 15 bp, Homo sapiens
gtacctcgtagaaga

SEQ ID NO: 1891774 - DNA, 15 bp, Homo sapiens
tacctcgtagaagat

SEQ ID NO: 1891775 - DNA, 15 bp, Homo sapiens
acctcgtagaagatt

SEQ ID NO: 1891776 - DNA, 15 bp, Homo sapiens
cctcgtagaagattt

SEQ ID NO: 1891777 - DNA, 15 bp, Homo sapiens
ctcgtagaagattta

SEQ ID NO: 1891778 - DNA, 15 bp, Homo sapiens
tcgtagaagatttag

SEQ ID NO: 1891779 - DNA, 15 bp, Homo sapiens
cgtagaagatttaga

SEQ ID NO: 1891780 - DNA, 15 bp, Homo sapiens
gtagaagatttagat

SEQ ID NO: 1891781 - DNA, 15 bp, Homo sapiens
tagaagatttagatt

SEQ ID NO: 1891782 - DNA, 15 bp, Homo sapiens
agaagatttagatta

SEQ ID NO: 1891783 - DNA, 15 bp, Homo sapiens
gaagatttagattag

SEQ ID NO: 1891784 - DNA, 15 bp, Homo sapiens
aagatttagattagc

SEQ ID NO: 1891785 - DNA, 15 bp, Homo sapiens
agatttagattagcc

SEQ ID NO: 1891786 - DNA, 15 bp, Homo sapiens
gatttagattagcca

SEQ ID NO: 1891787 - DNA, 15 bp, Homo sapiens
atttagattagccat

SEQ ID NO: 1891788 - DNA, 15 bp, Homo sapiens
tttagattagccatt

SEQ ID NO: 1891789 - DNA, 15 bp, Homo sapiens
ttagattagccattt

SEQ ID NO: 1891790 - DNA, 15 bp, Homo sapiens
tagattagccattta

SEQ ID NO: 1891791 - DNA, 15 bp, Homo sapiens
agattagccatttag

SEQ ID NO: 1891792 - DNA, 15 bp, Homo sapiens
gattagccatttaga

SEQ ID NO: 1891793 - DNA, 15 bp, Homo sapiens
attagccatttagac

SEQ ID NO: 1891794 - DNA, 15 bp, Homo sapiens
ttagccatttagaca

SEQ ID NO: 1891795 - DNA, 15 bp, Homo sapiens
tagccatttagacag

SEQ ID NO: 1891796 - DNA, 15 bp, Homo sapiens
agccatttagacaga

SEQ ID NO: 1891797 - DNA, 15 bp, Homo sapiens
gccatttagacagag

SEQ ID NO: 1891798 - DNA, 15 bp, Homo sapiens
ccatttagacagaga

SEQ ID NO: 1891799 - DNA, 15 bp, Homo sapiens
catttagacagagac

SEQ ID NO: 1891800 - DNA, 15 bp, Homo sapiens
atttagacagagact

SEQ ID NO: 1891801 - DNA, 15 bp, Homo sapiens
tttagacagagactt

SEQ ID NO: 1891802 - DNA, 15 bp, Homo sapiens
ttagacagagacttg

SEQ ID NO: 1891803 - DNA, 15 bp, Homo sapiens
tagacagagacttga

SEQ ID NO: 1891804 - DNA, 15 bp, Homo sapiens
agacagagacttgac

SEQ ID NO: 1891805 - DNA, 15 bp, Homo sapiens
gacagagacttgaca

SEQ ID NO: 1891806 - DNA, 15 bp, Homo sapiens
acagagacttgacag

SEQ ID NO: 1891807 - DNA, 15 bp, Homo sapiens
cagagacttgacagc

SEQ ID NO: 1891808 - DNA, 15 bp, Homo sapiens
agagacttgacagcc

SEQ ID NO: 1891809 - DNA, 15 bp, Homo sapiens
gagacttgacagccg

SEQ ID NO: 1891810 - DNA, 15 bp, Homo sapiens
agacttgacagccga

SEQ ID NO: 1891811 - DNA, 15 bp, Homo sapiens
gacttgacagccgaa

SEQ ID NO: 1891812 - DNA, 15 bp, Homo sapiens
acttgacagccgaat

SEQ ID NO: 1891813 - DNA, 15 bp, Homo sapiens
cttgacagccgaatt

SEQ ID NO: 1891814 - DNA, 15 bp, Homo sapiens
ttgacagccgaattt

SEQ ID NO: 1891815 - DNA, 15 bp, Homo sapiens
tgacagccgaattta

SEQ ID NO: 1891816 - DNA, 15 bp, Homo sapiens
gacagccgaatttaa

SEQ ID NO: 1891817 - DNA, 15 bp, Homo sapiens
acagccgaatttaac

SEQ ID NO: 1891818 - DNA, 15 bp, Homo sapiens
cagccgaatttaact

SEQ ID NO: 1891819 - DNA, 15 bp, Homo sapiens
agccgaatttaactc

SEQ ID NO: 1891820 - DNA, 15 bp, Homo sapiens
gccgaatttaactcc

SEQ ID NO: 1891821 - DNA, 15 bp, Homo sapiens
ccgaatttaactcct

SEQ ID NO: 1891822 - DNA, 15 bp, Homo sapiens
cgaatttaactcctg

SEQ ID NO: 1891823 - DNA, 15 bp, Homo sapiens
gaatttaactcctgc

SEQ ID NO: 1891824 - DNA, 15 bp, Homo sapiens
aatttaactcctgcc

SEQ ID NO: 1891825 - DNA, 15 bp, Homo sapiens
atttaactcctgcca

SEQ ID NO: 1891826 - DNA, 15 bp, Homo sapiens
tttaactcctgccat

SEQ ID NO: 1891827 - DNA, 15 bp, Homo sapiens
ttaactcctgccatg

SEQ ID NO: 1891828 - DNA, 15 bp, Homo sapiens
taactcctgccatga

SEQ ID NO: 1891829 - DNA, 15 bp, Homo sapiens
aactcctgccatgac

SEQ ID NO: 1891830 - DNA, 15 bp, Homo sapiens
actcctgccatgact

SEQ ID NO: 1891831 - DNA, 15 bp, Homo sapiens
ctcctgccatgacta

SEQ ID NO: 1891832 - DNA, 15 bp, Homo sapiens
tcctgccatgactag

SEQ ID NO: 1891833 - DNA, 15 bp, Homo sapiens
cctgccatgactaga

SEQ ID NO: 1891834 - DNA, 15 bp, Homo sapiens
ctgccatgactagat

SEQ ID NO: 1891835 - DNA, 15 bp, Homo sapiens
tgccatgactagatg

SEQ ID NO: 1891836 - DNA, 15 bp, Homo sapiens
gccatgactagatgc

SEQ ID NO: 1891837 - DNA, 15 bp, Homo sapiens
ccatgactagatgca

SEQ ID NO: 1891838 - DNA, 15 bp, Homo sapiens
catgactagatgcaa

SEQ ID NO: 1891839 - DNA, 15 bp, Homo sapiens
atgactagatgcaag

SEQ ID NO: 1891840 - DNA, 15 bp, Homo sapiens
tgactagatgcaagc

SEQ ID NO: 1891841 - DNA, 15 bp, Homo sapiens
gactagatgcaagca

SEQ ID NO: 1891842 - DNA, 15 bp, Homo sapiens
actagatgcaagcac

SEQ ID NO: 1891843 - DNA, 15 bp, Homo sapiens
ctagatgcaagcacg

SEQ ID NO: 1891844 - DNA, 15 bp, Homo sapiens
tagatgcaagcacgc

SEQ ID NO: 1891845 - DNA, 15 bp, Homo sapiens
agatgcaagcacgct

SEQ ID NO: 1891846 - DNA, 15 bp, Homo sapiens
gatgcaagcacgctt

SEQ ID NO: 1891847 - DNA, 15 bp, Homo sapiens
atgcaagcacgcttt

SEQ ID NO: 1891848 - DNA, 15 bp, Homo sapiens
tgcaagcacgctttc

SEQ ID NO: 1891849 - DNA, 15 bp, Homo sapiens
gcaagcacgctttct

SEQ ID NO: 1891850 - DNA, 15 bp, Homo sapiens
caagcacgctttctg

SEQ ID NO: 1891851 - DNA, 15 bp, Homo sapiens
aagcacgctttctgc

SEQ ID NO: 1891852 - DNA, 15 bp, Homo sapiens
agcacgctttctgct

SEQ ID NO: 1891853 - DNA, 15 bp, Homo sapiens
gcacgctttctgctt

SEQ ID NO: 1891854 - DNA, 15 bp, Homo sapiens
cacgctttctgcttc

SEQ ID NO: 1891855 - DNA, 15 bp, Homo sapiens
acgctttctgcttct

SEQ ID NO: 1891856 - DNA, 15 bp, Homo sapiens
cgctttctgcttctg

SEQ ID NO: 1891857 - DNA, 15 bp, Homo sapiens
gctttctgcttctgc

SEQ ID NO: 1891858 - DNA, 15 bp, Homo sapiens
ctttctgcttctgct

SEQ ID NO: 1891859 - DNA, 15 bp, Homo sapiens
tttctgcttctgctg

SEQ ID NO: 1891860 - DNA, 15 bp, Homo sapiens
ttctgcttctgctgg

SEQ ID NO: 1891861 - DNA, 15 bp, Homo sapiens
tctgcttctgctggg

SEQ ID NO: 1891862 - DNA, 15 bp, Homo sapiens
ctgcttctgctgggg

SEQ ID NO: 1891863 - DNA, 15 bp, Homo sapiens
tgcttctgctggggt

SEQ ID NO: 1891864 - DNA, 15 bp, Homo sapiens
gcttctgctggggtt

SEQ ID NO: 1891865 - DNA, 15 bp, Homo sapiens
cttctgctggggttt

SEQ ID NO: 1891866 - DNA, 15 bp, Homo sapiens
ttctgctggggtttt

SEQ ID NO: 1891867 - DNA, 15 bp, Homo sapiens
tctgctggggttttt

SEQ ID NO: 1891868 - DNA, 15 bp, Homo sapiens
ctgctggggtttttg

SEQ ID NO: 1891869 - DNA, 15 bp, Homo sapiens
tgctggggtttttgc

SEQ ID NO: 1891870 - DNA, 15 bp, Homo sapiens
gctggggtttttgct

SEQ ID NO: 1891871 - DNA, 15 bp, Homo sapiens
ctggggtttttgctg

SEQ ID NO: 1891872 - DNA, 15 bp, Homo sapiens
tggggtttttgctgg

SEQ ID NO: 1891873 - DNA, 15 bp, Homo sapiens
ggggtttttgctggc

SEQ ID NO: 1891874 - DNA, 15 bp, Homo sapiens
gggtttttgctggcc

SEQ ID NO: 1891875 - DNA, 15 bp, Homo sapiens
ggtttttgctggcct

SEQ ID NO: 1891876 - DNA, 15 bp, Homo sapiens
gtttttgctggcctc

SEQ ID NO: 1891877 - DNA, 15 bp, Homo sapiens
tttttgctggcctcg

SEQ ID NO: 1891878 - DNA, 15 bp, Homo sapiens
ttttgctggcctcgg

SEQ ID NO: 1891879 - DNA, 15 bp, Homo sapiens
tttgctggcctcggt

SEQ ID NO: 1891880 - DNA, 15 bp, Homo sapiens
ttgctggcctcggtc

SEQ ID NO: 1891881 - DNA, 15 bp, Homo sapiens
tgctggcctcggtcc

SEQ ID NO: 1891882 - DNA, 15 bp, Homo sapiens
gctggcctcggtccg

SEQ ID NO: 1891883 - DNA, 15 bp, Homo sapiens
ctggcctcggtccgt

SEQ ID NO: 1891884 - DNA, 15 bp, Homo sapiens
tggcctcggtccgtg

SEQ ID NO: 1891885 - DNA, 15 bp, Homo sapiens
ggcctcggtccgtgg

SEQ ID NO: 1891886 - DNA, 15 bp, Homo sapiens
gcctcggtccgtggg

SEQ ID NO: 1891887 - DNA, 15 bp, Homo sapiens
cctcggtccgtgggg

SEQ ID NO: 1891888 - DNA, 15 bp, Homo sapiens
ctcggtccgtggggt

SEQ ID NO: 1891889 - DNA, 15 bp, Homo sapiens
tcggtccgtggggtc

SEQ ID NO: 1891890 - DNA, 15 bp, Homo sapiens
cggtccgtggggtca

SEQ ID NO: 1891891 - DNA, 15 bp, Homo sapiens
ggtccgtggggtcac

SEQ ID NO: 1891892 - DNA, 15 bp, Homo sapiens
gtccgtggggtcact

SEQ ID NO: 1891893 - DNA, 15 bp, Homo sapiens
tccgtggggtcactc

SEQ ID NO: 1891894 - DNA, 15 bp, Homo sapiens
ccgtggggtcactca

SEQ ID NO: 1891895 - DNA, 15 bp, Homo sapiens
cgtggggtcactcag

SEQ ID NO: 1891896 - DNA, 15 bp, Homo sapiens
gtggggtcactcaga

SEQ ID NO: 1891897 - DNA, 15 bp, Homo sapiens
tggggtcactcagag

SEQ ID NO: 1891898 - DNA, 15 bp, Homo sapiens
ggggtcactcagagg

SEQ ID NO: 1891899 - DNA, 15 bp, Homo sapiens
gggtcactcagaggt

SEQ ID NO: 1891900 - DNA, 15 bp, Homo sapiens
ggtcactcagaggtt

SEQ ID NO: 1891901 - DNA, 15 bp, Homo sapiens
gtcactcagaggttc

SEQ ID NO: 1891902 - DNA, 15 bp, Homo sapiens
tcactcagaggttcc

SEQ ID NO: 1891903 - DNA, 15 bp, Homo sapiens
cactcagaggttcca

SEQ ID NO: 1891904 - DNA, 15 bp, Homo sapiens
actcagaggttccat

SEQ ID NO: 1891905 - DNA, 15 bp, Homo sapiens
ctcagaggttccatg

SEQ ID NO: 1891906 - DNA, 15 bp, Homo sapiens
tcagaggttccatgc

SEQ ID NO: 1891907 - DNA, 15 bp, Homo sapiens
cagaggttccatgca

SEQ ID NO: 1891908 - DNA, 15 bp, Homo sapiens
agaggttccatgcag

SEQ ID NO: 1891909 - DNA, 15 bp, Homo sapiens
gaggttccatgcagt

SEQ ID NO: 1891910 - DNA, 15 bp, Homo sapiens
aggttccatgcagta

SEQ ID NO: 1891911 - DNA, 15 bp, Homo sapiens
ggttccatgcagtag

SEQ ID NO: 1891912 - DNA, 15 bp, Homo sapiens
gttccatgcagtaga

SEQ ID NO: 1891913 - DNA, 15 bp, Homo sapiens
ttccatgcagtagaa

SEQ ID NO: 1891914 - DNA, 15 bp, Homo sapiens
tccatgcagtagaag

SEQ ID NO: 1891915 - DNA, 15 bp, Homo sapiens
ccatgcagtagaagt

SEQ ID NO: 1891916 - DNA, 15 bp, Homo sapiens
catgcagtagaagtt

SEQ ID NO: 1891917 - DNA, 15 bp, Homo sapiens
atgcagtagaagttt

SEQ ID NO: 1891918 - DNA, 15 bp, Homo sapiens
tgcagtagaagtttg

SEQ ID NO: 1891919 - DNA, 15 bp, Homo sapiens
gcagtagaagtttgg

SEQ ID NO: 1891920 - DNA, 15 bp, Homo sapiens
cagtagaagtttgga

SEQ ID NO: 1891921 - DNA, 15 bp, Homo sapiens
agtagaagtttggag

SEQ ID NO: 1891922 - DNA, 15 bp, Homo sapiens
gtagaagtttggaga

SEQ ID NO: 1891923 - DNA, 15 bp, Homo sapiens
tagaagtttggagag

SEQ ID NO: 1891924 - DNA, 15 bp, Homo sapiens
agaagtttggagagc

SEQ ID NO: 1891925 - DNA, 15 bp, Homo sapiens
gaagtttggagagct

SEQ ID NO: 1891926 - DNA, 15 bp, Homo sapiens
aagtttggagagctc

SEQ ID NO: 1891927 - DNA, 15 bp, Homo sapiens
agtttggagagctca

SEQ ID NO: 1891928 - DNA, 15 bp, Homo sapiens
gtttggagagctcat

SEQ ID NO: 1891929 - DNA, 15 bp, Homo sapiens
tttggagagctcatg

SEQ ID NO: 1891930 - DNA, 15 bp, Homo sapiens
ttggagagctcatgc

SEQ ID NO: 1891931 - DNA, 15 bp, Homo sapiens
tggagagctcatgct

SEQ ID NO: 1891932 - DNA, 15 bp, Homo sapiens
ggagagctcatgcta

SEQ ID NO: 1891933 - DNA, 15 bp, Homo sapiens
gagagctcatgctat

SEQ ID NO: 1891934 - DNA, 15 bp, Homo sapiens
agagctcatgctatt

SEQ ID NO: 1891935 - DNA, 15 bp, Homo sapiens
gagctcatgctattg

SEQ ID NO: 1891936 - DNA, 15 bp, Homo sapiens
agctcatgctattgg

SEQ ID NO: 1891937 - DNA, 15 bp, Homo sapiens
gctcatgctattggc

SEQ ID NO: 1891938 - DNA, 15 bp, Homo sapiens
ctcatgctattggct

SEQ ID NO: 1891939 - DNA, 15 bp, Homo sapiens
tcatgctattggctc

SEQ ID NO: 1891940 - DNA, 15 bp, Homo sapiens
catgctattggctca

SEQ ID NO: 1891941 - DNA, 15 bp, Homo sapiens
atgctattggctcac

SEQ ID NO: 1891942 - DNA, 15 bp, Homo sapiens
tgctattggctcact

SEQ ID NO: 1891943 - DNA, 15 bp, Homo sapiens
gctattggctcactg

SEQ ID NO: 1891944 - DNA, 15 bp, Homo sapiens
ctattggctcactgt

SEQ ID NO: 1891945 - DNA, 15 bp, Homo sapiens
tattggctcactgtg

SEQ ID NO: 1891946 - DNA, 15 bp, Homo sapiens
attggctcactgtgg

SEQ ID NO: 1891947 - DNA, 15 bp, Homo sapiens
ttggctcactgtggt

SEQ ID NO: 1891948 - DNA, 15 bp, Homo sapiens
tggctcactgtggtt

SEQ ID NO: 1891949 - DNA, 15 bp, Homo sapiens
ggctcactgtggttt

SEQ ID NO: 1891950 - DNA, 15 bp, Homo sapiens
gctcactgtggtttt

SEQ ID NO: 1891951 - DNA, 15 bp, Homo sapiens
ctcactgtggtttta

SEQ ID NO: 1891952 - DNA, 15 bp, Homo sapiens
tcactgtggttttat

SEQ ID NO: 1891953 - DNA, 15 bp, Homo sapiens
cactgtggttttatg

SEQ ID NO: 1891954 - DNA, 15 bp, Homo sapiens
actgtggttttatgg

SEQ ID NO: 1891955 - DNA, 15 bp, Homo sapiens
ctgtggttttatggg

SEQ ID NO: 1891956 - DNA, 15 bp, Homo sapiens
tgtggttttatgggc

SEQ ID NO: 1891957 - DNA, 15 bp, Homo sapiens
gtggttttatgggcc

SEQ ID NO: 1891958 - DNA, 15 bp, Homo sapiens
tggttttatgggccc

SEQ ID NO: 1891959 - DNA, 15 bp, Homo sapiens
ggttttatgggccct

SEQ ID NO: 1891960 - DNA, 15 bp, Homo sapiens
gttttatgggcccta

SEQ ID NO: 1891961 - DNA, 15 bp, Homo sapiens
ttttatgggccctag

SEQ ID NO: 1891962 - DNA, 15 bp, Homo sapiens
tttatgggccctaga

SEQ ID NO: 1891963 - DNA, 15 bp, Homo sapiens
ttatgggccctagat

SEQ ID NO: 1891964 - DNA, 15 bp, Homo sapiens
tatgggccctagatg

SEQ ID NO: 1891965 - DNA, 15 bp, Homo sapiens
atgggccctagatgt

SEQ ID NO: 1891966 - DNA, 15 bp, Homo sapiens
tgggccctagatgtg

SEQ ID NO: 1891967 - DNA, 15 bp, Homo sapiens
gggccctagatgtgt

SEQ ID NO: 1891968 - DNA, 15 bp, Homo sapiens
ggccctagatgtgta

SEQ ID NO: 1891969 - DNA, 15 bp, Homo sapiens
gccctagatgtgtag

SEQ ID NO: 1891970 - DNA, 15 bp, Homo sapiens
ccctagatgtgtaga

SEQ ID NO: 1891971 - DNA, 15 bp, Homo sapiens
cctagatgtgtagat

SEQ ID NO: 1891972 - DNA, 15 bp, Homo sapiens
ctagatgtgtagatg

SEQ ID NO: 1891973 - DNA, 15 bp, Homo sapiens
tagatgtgtagatgc

SEQ ID NO: 1891974 - DNA, 15 bp, Homo sapiens
agatgtgtagatgct

SEQ ID NO: 1891975 - DNA, 15 bp, Homo sapiens
gatgtgtagatgctt

SEQ ID NO: 1891976 - DNA, 15 bp, Homo sapiens
atgtgtagatgcttc

SEQ ID NO: 1891977 - DNA, 15 bp, Homo sapiens
tgtgtagatgcttcc

SEQ ID NO: 1891978 - DNA, 15 bp, Homo sapiens
gtgtagatgcttccg

SEQ ID NO: 1891979 - DNA, 15 bp, Homo sapiens
tgtagatgcttccgg

SEQ ID NO: 1891980 - DNA, 15 bp, Homo sapiens
gtagatgcttccggg

SEQ ID NO: 1891981 - DNA, 15 bp, Homo sapiens
tagatgcttccgggt

SEQ ID NO: 1891982 - DNA, 15 bp, Homo sapiens
agatgcttccgggtt

SEQ ID NO: 1891983 - DNA, 15 bp, Homo sapiens
gatgcttccgggttg

SEQ ID NO: 1891984 - DNA, 15 bp, Homo sapiens
atgcttccgggttga

SEQ ID NO: 1891985 - DNA, 15 bp, Homo sapiens
tgcttccgggttgat

SEQ ID NO: 1891986 - DNA, 15 bp, Homo sapiens
gcttccgggttgatg

SEQ ID NO: 1891987 - DNA, 15 bp, Homo sapiens
cttccgggttgatgc

SEQ ID NO: 1891988 - DNA, 15 bp, Homo sapiens
ttccgggttgatgcc

SEQ ID NO: 1891989 - DNA, 15 bp, Homo sapiens
tccgggttgatgccc

SEQ ID NO: 1891990 - DNA, 15 bp, Homo sapiens
ccgggttgatgccca

SEQ ID NO: 1891991 - DNA, 15 bp, Homo sapiens
cgggttgatgcccaa

SEQ ID NO: 1891992 - DNA, 15 bp, Homo sapiens
gggttgatgcccaag

SEQ ID NO: 1891993 - DNA, 15 bp, Homo sapiens
ggttgatgcccaagc

SEQ ID NO: 1891994 - DNA, 15 bp, Homo sapiens
gttgatgcccaagca

SEQ ID NO: 1891995 - DNA, 15 bp, Homo sapiens
ttgatgcccaagcag

SEQ ID NO: 1891996 - DNA, 15 bp, Homo sapiens
tgatgcccaagcagt

SEQ ID NO: 1891997 - DNA, 15 bp, Homo sapiens
gatgcccaagcagtg

SEQ ID NO: 1891998 - DNA, 15 bp, Homo sapiens
atgcccaagcagtgg

SEQ ID NO: 1891999 - DNA, 15 bp, Homo sapiens
tgcccaagcagtggt

SEQ ID NO: 1892000 - DNA, 15 bp, Homo sapiens
gcccaagcagtggtc

SEQ ID NO: 1892001 - DNA, 15 bp, Homo sapiens
cccaagcagtggtcc

SEQ ID NO: 1892002 - DNA, 15 bp, Homo sapiens
ccaagcagtggtccc

SEQ ID NO: 1892003 - DNA, 15 bp, Homo sapiens
caagcagtggtccca

SEQ ID NO: 1892004 - DNA, 15 bp, Homo sapiens
aagcagtggtcccac

SEQ ID NO: 1892005 - DNA, 15 bp, Homo sapiens
agcagtggtcccacc

SEQ ID NO: 1892006 - DNA, 15 bp, Homo sapiens
gcagtggtcccacct

SEQ ID NO: 1892007 - DNA, 15 bp, Homo sapiens
cagtggtcccacctg

SEQ ID NO: 1892008 - DNA, 15 bp, Homo sapiens
agtggtcccacctgg

SEQ ID NO: 1892009 - DNA, 15 bp, Homo sapiens
gtggtcccacctgga

SEQ ID NO: 1892010 - DNA, 15 bp, Homo sapiens
tggtcccacctggat

SEQ ID NO: 1892011 - DNA, 15 bp, Homo sapiens
ggtcccacctggatg

SEQ ID NO: 1892012 - DNA, 15 bp, Homo sapiens
gtcccacctggatgg

SEQ ID NO: 1892013 - DNA, 15 bp, Homo sapiens
tcccacctggatggt

SEQ ID NO: 1892014 - DNA, 15 bp, Homo sapiens
cccacctggatggtt

SEQ ID NO: 1892015 - DNA, 15 bp, Homo sapiens
ccacctggatggttt

SEQ ID NO: 1892016 - DNA, 15 bp, Homo sapiens
cacctggatggtttt

SEQ ID NO: 1892017 - DNA, 15 bp, Homo sapiens
acctggatggttttt

SEQ ID NO: 1892018 - DNA, 15 bp, Homo sapiens
cctggatggtttttg

SEQ ID NO: 1892019 - DNA, 15 bp, Homo sapiens
ctggatggtttttgt

SEQ ID NO: 1892020 - DNA, 15 bp, Homo sapiens
tggatggtttttgtc

SEQ ID NO: 1892021 - DNA, 15 bp, Homo sapiens
ggatggtttttgtct

SEQ ID NO: 1892022 - DNA, 15 bp, Homo sapiens
gatggtttttgtctt

SEQ ID NO: 1892023 - DNA, 15 bp, Homo sapiens
atggtttttgtcttt

SEQ ID NO: 1892024 - DNA, 15 bp, Homo sapiens
tggtttttgtctttc

SEQ ID NO: 1892025 - DNA, 15 bp, Homo sapiens
ggtttttgtctttct

SEQ ID NO: 1892026 - DNA, 15 bp, Homo sapiens
gtttttgtctttctg

SEQ ID NO: 1892027 - DNA, 15 bp, Homo sapiens
tttttgtctttctgc

SEQ ID NO: 1892028 - DNA, 15 bp, Homo sapiens
ttttgtctttctgct

SEQ ID NO: 1892029 - DNA, 15 bp, Homo sapiens
tttgtctttctgctt

SEQ ID NO: 1892030 - DNA, 15 bp, Homo sapiens
ttgtctttctgcttt

SEQ ID NO: 1892031 - DNA, 15 bp, Homo sapiens
tgtctttctgctttt

SEQ ID NO: 1892032 - DNA, 15 bp, Homo sapiens
gtctttctgcttttc

SEQ ID NO: 1892033 - DNA, 15 bp, Homo sapiens
tctttctgcttttca

SEQ ID NO: 1892034 - DNA, 15 bp, Homo sapiens
ctttctgcttttcag

SEQ ID NO: 1892035 - DNA, 15 bp, Homo sapiens
tttctgcttttcaga

SEQ ID NO: 1892036 - DNA, 15 bp, Homo sapiens
ttctgcttttcagat

SEQ ID NO: 1892037 - DNA, 15 bp, Homo sapiens
tctgcttttcagatt

SEQ ID NO: 1892038 - DNA, 15 bp, Homo sapiens
ctgcttttcagattc

SEQ ID NO: 1892039 - DNA, 15 bp, Homo sapiens
tgcttttcagattct

SEQ ID NO: 1892040 - DNA, 15 bp, Homo sapiens
gcttttcagattctc

SEQ ID NO: 1892041 - DNA, 15 bp, Homo sapiens
cttttcagattctct

SEQ ID NO: 1892042 - DNA, 15 bp, Homo sapiens
ttttcagattctctc

SEQ ID NO: 1892043 - DNA, 15 bp, Homo sapiens
tttcagattctctcc

SEQ ID NO: 1892044 - DNA, 15 bp, Homo sapiens
ttcagattctctcct

SEQ ID NO: 1892045 - DNA, 15 bp, Homo sapiens
tcagattctctcctg

SEQ ID NO: 1892046 - DNA, 15 bp, Homo sapiens
cagattctctcctga

SEQ ID NO: 1892047 - DNA, 15 bp, Homo sapiens
agattctctcctgag

SEQ ID NO: 1892048 - DNA, 15 bp, Homo sapiens
gattctctcctgagg

SEQ ID NO: 1892049 - DNA, 15 bp, Homo sapiens
attctctcctgaggc

SEQ ID NO: 1892050 - DNA, 15 bp, Homo sapiens
ttctctcctgaggct

SEQ ID NO: 1892051 - DNA, 15 bp, Homo sapiens
tctctcctgaggctg

SEQ ID NO: 1892052 - DNA, 15 bp, Homo sapiens
ctctcctgaggctgc

SEQ ID NO: 1892053 - DNA, 15 bp, Homo sapiens
tctcctgaggctgca

SEQ ID NO: 1892054 - DNA, 15 bp, Homo sapiens
ctcctgaggctgcat

SEQ ID NO: 1892055 - DNA, 15 bp, Homo sapiens
tcctgaggctgcatc

SEQ ID NO: 1892056 - DNA, 15 bp, Homo sapiens
cctgaggctgcatct

SEQ ID NO: 1892057 - DNA, 15 bp, Homo sapiens
ctgaggctgcatctc

SEQ ID NO: 1892058 - DNA, 15 bp, Homo sapiens
tgaggctgcatctcg

SEQ ID NO: 1892059 - DNA, 15 bp, Homo sapiens
gaggctgcatctcgg

SEQ ID NO: 1892060 - DNA, 15 bp, Homo sapiens
aggctgcatctcggc

SEQ ID NO: 1892061 - DNA, 15 bp, Homo sapiens
ggctgcatctcggcg

SEQ ID NO: 1892062 - DNA, 15 bp, Homo sapiens
gctgcatctcggcgg

SEQ ID NO: 1892063 - DNA, 15 bp, Homo sapiens
ctgcatctcggcggg

SEQ ID NO: 1892064 - DNA, 15 bp, Homo sapiens
tgcatctcggcgggg

SEQ ID NO: 1892065 - DNA, 15 bp, Homo sapiens
gcatctcggcggggg

SEQ ID NO: 1892066 - DNA, 15 bp, Homo sapiens
catctcggcgggggc

SEQ ID NO: 1892067 - DNA, 15 bp, Homo sapiens
atctcggcgggggct

SEQ ID NO: 1892068 - DNA, 15 bp, Homo sapiens
tctcggcgggggctg

SEQ ID NO: 1892069 - DNA, 15 bp, Homo sapiens
ctcggcgggggctga

SEQ ID NO: 1892070 - DNA, 15 bp, Homo sapiens
tcggcgggggctgag

SEQ ID NO: 1892071 - DNA, 15 bp, Homo sapiens
cggcgggggctgagc

SEQ ID NO: 1892072 - DNA, 15 bp, Homo sapiens
ggcgggggctgagca

SEQ ID NO: 1892073 - DNA, 15 bp, Homo sapiens
gcgggggctgagcac

SEQ ID NO: 1892074 - DNA, 15 bp, Homo sapiens
cgggggctgagcaca

SEQ ID NO: 1892075 - DNA, 15 bp, Homo sapiens
gggggctgagcacag

SEQ ID NO: 1892076 - DNA, 15 bp, Homo sapiens
ggggctgagcacagc

SEQ ID NO: 1892077 - DNA, 15 bp, Homo sapiens
gggctgagcacagca

SEQ ID NO: 1892078 - DNA, 15 bp, Homo sapiens
ggctgagcacagcag

SEQ ID NO: 1892079 - DNA, 15 bp, Homo sapiens
gctgagcacagcaga

SEQ ID NO: 1892080 - DNA, 15 bp, Homo sapiens
ctgagcacagcagag

SEQ ID NO: 1892081 - DNA, 15 bp, Homo sapiens
tgagcacagcagaga

SEQ ID NO: 1892082 - DNA, 15 bp, Homo sapiens
gagcacagcagagat

SEQ ID NO: 1892083 - DNA, 15 bp, Homo sapiens
agcacagcagagatg

SEQ ID NO: 1892084 - DNA, 15 bp, Homo sapiens
gcacagcagagatga

SEQ ID NO: 1892085 - DNA, 15 bp, Homo sapiens
cacagcagagatgaa

SEQ ID NO: 1892086 - DNA, 15 bp, Homo sapiens
acagcagagatgaat

SEQ ID NO: 1892087 - DNA, 15 bp, Homo sapiens
cagcagagatgaatg

SEQ ID NO: 1892088 - DNA, 15 bp, Homo sapiens
agcagagatgaatgc

SEQ ID NO: 1892089 - DNA, 15 bp, Homo sapiens
gcagagatgaatgca

SEQ ID NO: 1892090 - DNA, 15 bp, Homo sapiens
cagagatgaatgcag

SEQ ID NO: 1892091 - DNA, 15 bp, Homo sapiens
agagatgaatgcagt

SEQ ID NO: 1892092 - DNA, 15 bp, Homo sapiens
gagatgaatgcagta

SEQ ID NO: 1892093 - DNA, 15 bp, Homo sapiens
agatgaatgcagtag

SEQ ID NO: 1892094 - DNA, 15 bp, Homo sapiens
gatgaatgcagtaga

SEQ ID NO: 1892095 - DNA, 15 bp, Homo sapiens
atgaatgcagtagag

SEQ ID NO: 1892096 - DNA, 15 bp, Homo sapiens
tgaatgcagtagagg

SEQ ID NO: 1892097 - DNA, 15 bp, Homo sapiens
gaatgcagtagaggc

SEQ ID NO: 1892098 - DNA, 15 bp, Homo sapiens
aatgcagtagaggcc

SEQ ID NO: 1892099 - DNA, 15 bp, Homo sapiens
atgcagtagaggcca

SEQ ID NO: 1892100 - DNA, 15 bp, Homo sapiens
tgcagtagaggccat

SEQ ID NO: 1892101 - DNA, 15 bp, Homo sapiens
gcagtagaggccatt

SEQ ID NO: 1892102 - DNA, 15 bp, Homo sapiens
cagtagaggccattc

SEQ ID NO: 1892103 - DNA, 15 bp, Homo sapiens
agtagaggccattca

SEQ ID NO: 1892104 - DNA, 15 bp, Homo sapiens
gtagaggccattcat

SEQ ID NO: 1892105 - DNA, 15 bp, Homo sapiens
tagaggccattcata

SEQ ID NO: 1892106 - DNA, 15 bp, Homo sapiens
agaggccattcatag

SEQ ID NO: 1892107 - DNA, 15 bp, Homo sapiens
gaggccattcataga

SEQ ID NO: 1892108 - DNA, 15 bp, Homo sapiens
aggccattcatagag

SEQ ID NO: 1892109 - DNA, 15 bp, Homo sapiens
ggccattcatagagc

SEQ ID NO: 1892110 - DNA, 15 bp, Homo sapiens
gccattcatagagct

SEQ ID NO: 1892111 - DNA, 15 bp, Homo sapiens
ccattcatagagctg

SEQ ID NO: 1892112 - DNA, 15 bp, Homo sapiens
cattcatagagctgt

SEQ ID NO: 1892113 - DNA, 15 bp, Homo sapiens
attcatagagctgtg

SEQ ID NO: 1892114 - DNA, 15 bp, Homo sapiens
ttcatagagctgtgg

SEQ ID NO: 1892115 - DNA, 15 bp, Homo sapiens
tcatagagctgtgga

SEQ ID NO: 1892116 - DNA, 15 bp, Homo sapiens
catagagctgtggaa

SEQ ID NO: 1892117 - DNA, 15 bp, Homo sapiens
atagagctgtggaat

SEQ ID NO: 1892118 - DNA, 15 bp, Homo sapiens
tagagctgtggaatt

SEQ ID NO: 1892119 - DNA, 15 bp, Homo sapiens
agagctgtggaattc

SEQ ID NO: 1892120 - DNA, 15 bp, Homo sapiens
gagctgtggaattca

SEQ ID NO: 1892121 - DNA, 15 bp, Homo sapiens
agctgtggaattcaa

SEQ ID NO: 1892122 - DNA, 15 bp, Homo sapiens
gctgtggaattcaat

SEQ ID NO: 1892123 - DNA, 15 bp, Homo sapiens
ctgtggaattcaatc

SEQ ID NO: 1892124 - DNA, 15 bp, Homo sapiens
tgtggaattcaatcc

SEQ ID NO: 1892125 - DNA, 15 bp, Homo sapiens
gtggaattcaatcct

SEQ ID NO: 1892126 - DNA, 15 bp, Homo sapiens
tggaattcaatcctc

SEQ ID NO: 1892127 - DNA, 15 bp, Homo sapiens
ggaattcaatcctca

SEQ ID NO: 1892128 - DNA, 15 bp, Homo sapiens
gaattcaatcctcat

SEQ ID NO: 1892129 - DNA, 15 bp, Homo sapiens
aattcaatcctcatg

SEQ ID NO: 1892130 - DNA, 15 bp, Homo sapiens
attcaatcctcatgt

SEQ ID NO: 1892131 - DNA, 15 bp, Homo sapiens
ttcaatcctcatgtg

SEQ ID NO: 1892132 - DNA, 15 bp, Homo sapiens
tcaatcctcatgtgc

SEQ ID NO: 1892133 - DNA, 15 bp, Homo sapiens
caatcctcatgtgcc

SEQ ID NO: 1892134 - DNA, 15 bp, Homo sapiens
aatcctcatgtgcca

SEQ ID NO: 1892135 - DNA, 15 bp, Homo sapiens
atcctcatgtgccaa

SEQ ID NO: 1892136 - DNA, 15 bp, Homo sapiens
tcctcatgtgccaaa

SEQ ID NO: 1892137 - DNA, 15 bp, Homo sapiens
cctcatgtgccaaaa

SEQ ID NO: 1892138 - DNA, 15 bp, Homo sapiens
ctcatgtgccaaaag

SEQ ID NO: 1892139 - DNA, 15 bp, Homo sapiens
tcatgtgccaaaagt

SEQ ID NO: 1892140 - DNA, 15 bp, Homo sapiens
catgtgccaaaagtg

SEQ ID NO: 1892141 - DNA, 15 bp, Homo sapiens
atgtgccaaaagtga

SEQ ID NO: 1892142 - DNA, 15 bp, Homo sapiens
tgtgccaaaagtgag

SEQ ID NO: 1892143 - DNA, 15 bp, Homo sapiens
gtgccaaaagtgagt

SEQ ID NO: 1892144 - DNA, 15 bp, Homo sapiens
tgccaaaagtgagtc

SEQ ID NO: 1892145 - DNA, 15 bp, Homo sapiens
gccaaaagtgagtct

SEQ ID NO: 1892146 - DNA, 15 bp, Homo sapiens
ccaaaagtgagtctg

SEQ ID NO: 1892147 - DNA, 15 bp, Homo sapiens
caaaagtgagtctgt

SEQ ID NO: 1892148 - DNA, 15 bp, Homo sapiens
aaaagtgagtctgtg

SEQ ID NO: 1892149 - DNA, 15 bp, Homo sapiens
aaagtgagtctgtgg

SEQ ID NO: 1892150 - DNA, 15 bp, Homo sapiens
aagtgagtctgtgga

SEQ ID NO: 1892151 - DNA, 15 bp, Homo sapiens
agtgagtctgtggaa

SEQ ID NO: 1892152 - DNA, 15 bp, Homo sapiens
gtgagtctgtggaat

SEQ ID NO: 1892153 - DNA, 15 bp, Homo sapiens
tgagtctgtggaatc

SEQ ID NO: 1892154 - DNA, 15 bp, Homo sapiens
gagtctgtggaatcc

SEQ ID NO: 1892155 - DNA, 15 bp, Homo sapiens
agtctgtggaatccc

SEQ ID NO: 1892156 - DNA, 15 bp, Homo sapiens
gtctgtggaatcccc

SEQ ID NO: 1892157 - DNA, 15 bp, Homo sapiens
tctgtggaatcccca

SEQ ID NO: 1892158 - DNA, 15 bp, Homo sapiens
ctgtggaatccccac

SEQ ID NO: 1892159 - DNA, 15 bp, Homo sapiens
tgtggaatccccaca

SEQ ID NO: 1892160 - DNA, 15 bp, Homo sapiens
gtggaatccccacag

SEQ ID NO: 1892161 - DNA, 15 bp, Homo sapiens
tggaatccccacagg

SEQ ID NO: 1892162 - DNA, 15 bp, Homo sapiens
ggaatccccacagga

SEQ ID NO: 1892163 - DNA, 15 bp, Homo sapiens
gaatccccacaggaa

SEQ ID NO: 1892164 - DNA, 15 bp, Homo sapiens
aatccccacaggaac

SEQ ID NO: 1892165 - DNA, 15 bp, Homo sapiens
atccccacaggaact

SEQ ID NO: 1892166 - DNA, 15 bp, Homo sapiens
tccccacaggaactc

SEQ ID NO: 1892167 - DNA, 15 bp, Homo sapiens
ccccacaggaactcg

SEQ ID NO: 1892168 - DNA, 15 bp, Homo sapiens
cccacaggaactcgt

SEQ ID NO: 1892169 - DNA, 15 bp, Homo sapiens
ccacaggaactcgtt

SEQ ID NO: 1892170 - DNA, 15 bp, Homo sapiens
cacaggaactcgtta

SEQ ID NO: 1892171 - DNA, 15 bp, Homo sapiens
acaggaactcgttat

SEQ ID NO: 1892172 - DNA, 15 bp, Homo sapiens
caggaactcgttatg

SEQ ID NO: 1892173 - DNA, 15 bp, Homo sapiens
aggaactcgttatga

SEQ ID NO: 1892174 - DNA, 15 bp, Homo sapiens
ggaactcgttatgat

SEQ ID NO: 1892175 - DNA, 15 bp, Homo sapiens
gaactcgttatgata

SEQ ID NO: 1892176 - DNA, 15 bp, Homo sapiens
aactcgttatgatag

SEQ ID NO: 1892177 - DNA, 15 bp, Homo sapiens
actcgttatgatagc

SEQ ID NO: 1892178 - DNA, 15 bp, Homo sapiens
ctcgttatgatagca

SEQ ID NO: 1892179 - DNA, 15 bp, Homo sapiens
tcgttatgatagcag

SEQ ID NO: 1892180 - DNA, 15 bp, Homo sapiens
cgttatgatagcaga

SEQ ID NO: 1892181 - DNA, 15 bp, Homo sapiens
gttatgatagcagag

SEQ ID NO: 1892182 - DNA, 15 bp, Homo sapiens
ttatgatagcagaga

SEQ ID NO: 1892183 - DNA, 15 bp, Homo sapiens
tatgatagcagagaa

SEQ ID NO: 1892184 - DNA, 15 bp, Homo sapiens
atgatagcagagaaa

SEQ ID NO: 1892185 - DNA, 15 bp, Homo sapiens
tgatagcagagaaag

SEQ ID NO: 1892186 - DNA, 15 bp, Homo sapiens
gatagcagagaaagc

SEQ ID NO: 1892187 - DNA, 15 bp, Homo sapiens
atagcagagaaagca

SEQ ID NO: 1892188 - DNA, 15 bp, Homo sapiens
tagcagagaaagcat

SEQ ID NO: 1892189 - DNA, 15 bp, Homo sapiens
agcagagaaagcatt

SEQ ID NO: 1892190 - DNA, 15 bp, Homo sapiens
gcagagaaagcattc

SEQ ID NO: 1892191 - DNA, 15 bp, Homo sapiens
cagagaaagcattca

SEQ ID NO: 1892192 - DNA, 15 bp, Homo sapiens
agagaaagcattcat

SEQ ID NO: 1892193 - DNA, 15 bp, Homo sapiens
gagaaagcattcatt

SEQ ID NO: 1892194 - DNA, 15 bp, Homo sapiens
agaaagcattcattg

SEQ ID NO: 1892195 - DNA, 15 bp, Homo sapiens
gaaagcattcattga

SEQ ID NO: 1892196 - DNA, 15 bp, Homo sapiens
aaagcattcattgac

SEQ ID NO: 1892197 - DNA, 15 bp, Homo sapiens
aagcattcattgacc

SEQ ID NO: 1892198 - DNA, 15 bp, Homo sapiens
agcattcattgacca

SEQ ID NO: 1892199 - DNA, 15 bp, Homo sapiens
gcattcattgaccac

SEQ ID NO: 1892200 - DNA, 15 bp, Homo sapiens
cattcattgaccaca

SEQ ID NO: 1892201 - DNA, 15 bp, Homo sapiens
attcattgaccacag

SEQ ID NO: 1892202 - DNA, 15 bp, Homo sapiens
ttcattgaccacagt

SEQ ID NO: 1892203 - DNA, 15 bp, Homo sapiens
tcattgaccacagtg

SEQ ID NO: 1892204 - DNA, 15 bp, Homo sapiens
cattgaccacagtgt

SEQ ID NO: 1892205 - DNA, 15 bp, Homo sapiens
attgaccacagtgtt

SEQ ID NO: 1892206 - DNA, 15 bp, Homo sapiens
ttgaccacagtgttg

SEQ ID NO: 1892207 - DNA, 15 bp, Homo sapiens
tgaccacagtgttgt

SEQ ID NO: 1892208 - DNA, 15 bp, Homo sapiens
gaccacagtgttgta

SEQ ID NO: 1892209 - DNA, 15 bp, Homo sapiens
accacagtgttgtat

SEQ ID NO: 1892210 - DNA, 15 bp, Homo sapiens
ccacagtgttgtatc

SEQ ID NO: 1892211 - DNA, 15 bp, Homo sapiens
cacagtgttgtatct

SEQ ID NO: 1892212 - DNA, 15 bp, Homo sapiens
acagtgttgtatctc

SEQ ID NO: 1892213 - DNA, 15 bp, Homo sapiens
cagtgttgtatctca

SEQ ID NO: 1892214 - DNA, 15 bp, Homo sapiens
agtgttgtatctcaa

SEQ ID NO: 1892215 - DNA, 15 bp, Homo sapiens
gtgttgtatctcaag

SEQ ID NO: 1892216 - DNA, 15 bp, Homo sapiens
tgttgtatctcaagt

SEQ ID NO: 1892217 - DNA, 15 bp, Homo sapiens
gttgtatctcaagta

SEQ ID NO: 1892218 - DNA, 15 bp, Homo sapiens
ttgtatctcaagtac

SEQ ID NO: 1892219 - DNA, 15 bp, Homo sapiens
tgtatctcaagtaca

SEQ ID NO: 1892220 - DNA, 15 bp, Homo sapiens
gtatctcaagtacac

SEQ ID NO: 1892221 - DNA, 15 bp, Homo sapiens
tatctcaagtacacc

SEQ ID NO: 1892222 - DNA, 15 bp, Homo sapiens
atctcaagtacaccg

SEQ ID NO: 1892223 - DNA, 15 bp, Homo sapiens
tctcaagtacaccgc

SEQ ID NO: 1892224 - DNA, 15 bp, Homo sapiens
ctcaagtacaccgct

SEQ ID NO: 1892225 - DNA, 15 bp, Homo sapiens
tcaagtacaccgctt

SEQ ID NO: 1892226 - DNA, 15 bp, Homo sapiens
caagtacaccgctta

SEQ ID NO: 1892227 - DNA, 15 bp, Homo sapiens
aagtacaccgcttat

SEQ ID NO: 1892228 - DNA, 15 bp, Homo sapiens
agtacaccgcttata

SEQ ID NO: 1892229 - DNA, 15 bp, Homo sapiens
gtacaccgcttataa

SEQ ID NO: 1892230 - DNA, 15 bp, Homo sapiens
tacaccgcttataaa

SEQ ID NO: 1892231 - DNA, 15 bp, Homo sapiens
acaccgcttataaaa

SEQ ID NO: 1892232 - DNA, 15 bp, Homo sapiens
caccgcttataaaaa

SEQ ID NO: 1892233 - DNA, 15 bp, Homo sapiens
accgcttataaaaaa

SEQ ID NO: 1892234 - DNA, 15 bp, Homo sapiens
ccgcttataaaaaaa

SEQ ID NO: 1892235 - DNA, 15 bp, Homo sapiens
cgcttataaaaaaat

SEQ ID NO: 1892236 - DNA, 15 bp, Homo sapiens
gcttataaaaaaatg

SEQ ID NO: 1892237 - DNA, 15 bp, Homo sapiens
cttataaaaaaatga

SEQ ID NO: 1892238 - DNA, 15 bp, Homo sapiens
ttataaaaaaatgaa

SEQ ID NO: 1892239 - DNA, 15 bp, Homo sapiens
tataaaaaaatgaat

SEQ ID NO: 1892240 - DNA, 15 bp, Homo sapiens
ataaaaaaatgaatt

SEQ ID NO: 1892241 - DNA, 15 bp, Homo sapiens
taaaaaaatgaattg

SEQ ID NO: 1892242 - DNA, 15 bp, Homo sapiens
aaaaaaatgaattgc

SEQ ID NO: 1892243 - DNA, 15 bp, Homo sapiens
aaaaaatgaattgca

SEQ ID NO: 1892244 - DNA, 15 bp, Homo sapiens
aaaaatgaattgcaa

SEQ ID NO: 1892245 - DNA, 15 bp, Homo sapiens
aaaatgaattgcaac

SEQ ID NO: 1892246 - DNA, 15 bp, Homo sapiens
aaatgaattgcaacc

SEQ ID NO: 1892247 - DNA, 15 bp, Homo sapiens
aatgaattgcaacca

SEQ ID NO: 1892248 - DNA, 15 bp, Homo sapiens
atgaattgcaaccaa

SEQ ID NO: 1892249 - DNA, 15 bp, Homo sapiens
tgaattgcaaccaac

SEQ ID NO: 1892250 - DNA, 15 bp, Homo sapiens
gaattgcaaccaaca

SEQ ID NO: 1892251 - DNA, 15 bp, Homo sapiens
aattgcaaccaacaa

SEQ ID NO: 1892252 - DNA, 15 bp, Homo sapiens
attgcaaccaacaaa

SEQ ID NO: 1892253 - DNA, 15 bp, Homo sapiens
ttgcaaccaacaaat

SEQ ID NO: 1892254 - DNA, 15 bp, Homo sapiens
tgcaaccaacaaatg

SEQ ID NO: 1892255 - DNA, 15 bp, Homo sapiens
gcaaccaacaaatgt

SEQ ID NO: 1892256 - DNA, 15 bp, Homo sapiens
caaccaacaaatgtt

SEQ ID NO: 1892257 - DNA, 15 bp, Homo sapiens
aaccaacaaatgttg

SEQ ID NO: 1892258 - DNA, 15 bp, Homo sapiens
accaacaaatgttga

SEQ ID NO: 1892259 - DNA, 15 bp, Homo sapiens
ccaacaaatgttgag

SEQ ID NO: 1892260 - DNA, 15 bp, Homo sapiens
caacaaatgttgaga

SEQ ID NO: 1892261 - DNA, 15 bp, Homo sapiens
aacaaatgttgagac

SEQ ID NO: 1892262 - DNA, 15 bp, Homo sapiens
acaaatgttgagacc

SEQ ID NO: 1892263 - DNA, 15 bp, Homo sapiens
caaatgttgagaccc

SEQ ID NO: 1892264 - DNA, 15 bp, Homo sapiens
aaatgttgagaccct

SEQ ID NO: 1892265 - DNA, 15 bp, Homo sapiens
aatgttgagaccctg

SEQ ID NO: 1892266 - DNA, 15 bp, Homo sapiens
atgttgagaccctgt

SEQ ID NO: 1892267 - DNA, 15 bp, Homo sapiens
tgttgagaccctgta

SEQ ID NO: 1892268 - DNA, 15 bp, Homo sapiens
gttgagaccctgtat

SEQ ID NO: 1892269 - DNA, 15 bp, Homo sapiens
ttgagaccctgtata

SEQ ID NO: 1892270 - DNA, 15 bp, Homo sapiens
tgagaccctgtataa

SEQ ID NO: 1892271 - DNA, 15 bp, Homo sapiens
gagaccctgtataat

SEQ ID NO: 1892272 - DNA, 15 bp, Homo sapiens
agaccctgtataatg

SEQ ID NO: 1892273 - DNA, 15 bp, Homo sapiens
gaccctgtataatgt

SEQ ID NO: 1892274 - DNA, 15 bp, Homo sapiens
accctgtataatgta

SEQ ID NO: 1892275 - DNA, 15 bp, Homo sapiens
ccctgtataatgtat

SEQ ID NO: 1892276 - DNA, 15 bp, Homo sapiens
cctgtataatgtatg

SEQ ID NO: 1892277 - DNA, 15 bp, Homo sapiens
ctgtataatgtatgg

SEQ ID NO: 1892278 - DNA, 15 bp, Homo sapiens
tgtataatgtatggg

SEQ ID NO: 1892279 - DNA, 15 bp, Homo sapiens
gtataatgtatgggc

SEQ ID NO: 1892280 - DNA, 15 bp, Homo sapiens
tataatgtatgggca

SEQ ID NO: 1892281 - DNA, 15 bp, Homo sapiens
ataatgtatgggcat

SEQ ID NO: 1892282 - DNA, 15 bp, Homo sapiens
taatgtatgggcatt

SEQ ID NO: 1892283 - DNA, 15 bp, Homo sapiens
aatgtatgggcatta

SEQ ID NO: 1892284 - DNA, 15 bp, Homo sapiens
atgtatgggcattag

SEQ ID NO: 1892285 - DNA, 15 bp, Homo sapiens
tgtatgggcattagc

SEQ ID NO: 1892286 - DNA, 15 bp, Homo sapiens
gtatgggcattagcc

SEQ ID NO: 1892287 - DNA, 15 bp, Homo sapiens
tatgggcattagcct

SEQ ID NO: 1892288 - DNA, 15 bp, Homo sapiens
atgggcattagcctc

SEQ ID NO: 1892289 - DNA, 15 bp, Homo sapiens
tgggcattagcctca

SEQ ID NO: 1892290 - DNA, 15 bp, Homo sapiens
gggcattagcctcat

SEQ ID NO: 1892291 - DNA, 15 bp, Homo sapiens
ggcattagcctcatt

SEQ ID NO: 1892292 - DNA, 15 bp, Homo sapiens
gcattagcctcattt

SEQ ID NO: 1892293 - DNA, 15 bp, Homo sapiens
cattagcctcatttt

SEQ ID NO: 1892294 - DNA, 15 bp, Homo sapiens
attagcctcatttta

SEQ ID NO: 1892295 - DNA, 15 bp, Homo sapiens
ttagcctcattttaa

SEQ ID NO: 1892296 - DNA, 15 bp, Homo sapiens
tagcctcattttaag

SEQ ID NO: 1892297 - DNA, 15 bp, Homo sapiens
agcctcattttaagc

SEQ ID NO: 1892298 - DNA, 15 bp, Homo sapiens
tcattttaagcaaaa

SEQ ID NO: 1892299 - DNA, 15 bp, Homo sapiens
cattttaagcaaaag

SEQ ID NO: 1892300 - DNA, 15 bp, Homo sapiens
attttaagcaaaagc

SEQ ID NO: 1892301 - DNA, 15 bp, Homo sapiens
ttttaagcaaaagct

SEQ ID NO: 1892302 - DNA, 15 bp, Homo sapiens
tttaagcaaaagcta

SEQ ID NO: 1892303 - DNA, 15 bp, Homo sapiens
ttaagcaaaagctat

SEQ ID NO: 1892304 - DNA, 15 bp, Homo sapiens
taagcaaaagctata

SEQ ID NO: 1892305 - DNA, 15 bp, Homo sapiens
aagcaaaagctatac

SEQ ID NO: 1892306 - DNA, 15 bp, Homo sapiens
agcaaaagctatact

SEQ ID NO: 1892307 - DNA, 15 bp, Homo sapiens
gcaaaagctatactc

SEQ ID NO: 1892308 - DNA, 15 bp, Homo sapiens
caaaagctatactca

SEQ ID NO: 1892309 - DNA, 15 bp, Homo sapiens
aaaagctatactcaa

SEQ ID NO: 1892310 - DNA, 15 bp, Homo sapiens
aaagctatactcaag

SEQ ID NO: 1892311 - DNA, 15 bp, Homo sapiens
aagctatactcaaga

SEQ ID NO: 1892312 - DNA, 15 bp, Homo sapiens
agctatactcaagag

SEQ ID NO: 1892313 - DNA, 15 bp, Homo sapiens
gctatactcaagagg

SEQ ID NO: 1892314 - DNA, 15 bp, Homo sapiens
ctatactcaagaggc

SEQ ID NO: 1892315 - DNA, 15 bp, Homo sapiens
tatactcaagaggct

SEQ ID NO: 1892316 - DNA, 15 bp, Homo sapiens
atactcaagaggctt

SEQ ID NO: 1892317 - DNA, 15 bp, Homo sapiens
tactcaagaggcttt

SEQ ID NO: 1892318 - DNA, 15 bp, Homo sapiens
actcaagaggctttg

SEQ ID NO: 1892319 - DNA, 15 bp, Homo sapiens
ctcaagaggctttgg

SEQ ID NO: 1892320 - DNA, 15 bp, Homo sapiens
tcaagaggctttggg

SEQ ID NO: 1892321 - DNA, 15 bp, Homo sapiens
caagaggctttgggg

SEQ ID NO: 1892322 - DNA, 15 bp, Homo sapiens
aagaggctttggggc

SEQ ID NO: 1892323 - DNA, 15 bp, Homo sapiens
agaggctttggggca

SEQ ID NO: 1892324 - DNA, 15 bp, Homo sapiens
gaggctttggggcag

SEQ ID NO: 1892325 - DNA, 15 bp, Homo sapiens
aggctttggggcaga

SEQ ID NO: 1892326 - DNA, 15 bp, Homo sapiens
ggctttggggcagat

SEQ ID NO: 1892327 - DNA, 15 bp, Homo sapiens
gctttggggcagatt

SEQ ID NO: 1892328 - DNA, 15 bp, Homo sapiens
ctttggggcagattt

SEQ ID NO: 1892329 - DNA, 15 bp, Homo sapiens
tttggggcagatttc

SEQ ID NO: 1892330 - DNA, 15 bp, Homo sapiens
ttggggcagatttcc

SEQ ID NO: 1892331 - DNA, 15 bp, Homo sapiens
tggggcagatttcca

SEQ ID NO: 1892332 - DNA, 15 bp, Homo sapiens
ggggcagatttccag

SEQ ID NO: 1892333 - DNA, 15 bp, Homo sapiens
gggcagatttccaga

SEQ ID NO: 1892334 - DNA, 15 bp, Homo sapiens
ggcagatttccagac

SEQ ID NO: 1892335 - DNA, 15 bp, Homo sapiens
gcagatttccagact

SEQ ID NO: 1892336 - DNA, 15 bp, Homo sapiens
cagatttccagactt

SEQ ID NO: 1892337 - DNA, 15 bp, Homo sapiens
agatttccagacttc

SEQ ID NO: 1892338 - DNA, 15 bp, Homo sapiens
gatttccagacttca

SEQ ID NO: 1892339 - DNA, 15 bp, Homo sapiens
atttccagacttcac

SEQ ID NO: 1892340 - DNA, 15 bp, Homo sapiens
tttccagacttcact

SEQ ID NO: 1892341 - DNA, 15 bp, Homo sapiens
ttccagacttcactt

SEQ ID NO: 1892342 - DNA, 15 bp, Homo sapiens
tccagacttcactta

SEQ ID NO: 1892343 - DNA, 15 bp, Homo sapiens
ccagacttcacttaa

SEQ ID NO: 1892344 - DNA, 15 bp, Homo sapiens
cagacttcacttaat

SEQ ID NO: 1892345 - DNA, 15 bp, Homo sapiens
agacttcacttaata

SEQ ID NO: 1892346 - DNA, 15 bp, Homo sapiens
gacttcacttaataa

SEQ ID NO: 1892347 - DNA, 15 bp, Homo sapiens
acttcacttaataag

SEQ ID NO: 1892348 - DNA, 15 bp, Homo sapiens
cttcacttaataagg

SEQ ID NO: 1892349 - DNA, 15 bp, Homo sapiens
ttcacttaataaggg

SEQ ID NO: 1892350 - DNA, 15 bp, Homo sapiens
tcacttaataagggt

SEQ ID NO: 1892351 - DNA, 15 bp, Homo sapiens
cacttaataagggta

SEQ ID NO: 1892352 - DNA, 15 bp, Homo sapiens
acttaataagggtaa

SEQ ID NO: 1892353 - DNA, 15 bp, Homo sapiens
cttaataagggtaaa

SEQ ID NO: 1892354 - DNA, 15 bp, Homo sapiens
ttaataagggtaaat

SEQ ID NO: 1892355 - DNA, 15 bp, Homo sapiens
taataagggtaaatc

SEQ ID NO: 1892356 - DNA, 15 bp, Homo sapiens
aataagggtaaatcg

SEQ ID NO: 1892357 - DNA, 15 bp, Homo sapiens
ataagggtaaatcga

SEQ ID NO: 1892358 - DNA, 15 bp, Homo sapiens
taagggtaaatcgat

SEQ ID NO: 1892359 - DNA, 15 bp, Homo sapiens
aagggtaaatcgata

SEQ ID NO: 1892360 - DNA, 15 bp, Homo sapiens
agggtaaatcgatag

SEQ ID NO: 1892361 - DNA, 15 bp, Homo sapiens
gggtaaatcgataga

SEQ ID NO: 1892362 - DNA, 15 bp, Homo sapiens
ggtaaatcgatagac

SEQ ID NO: 1892363 - DNA, 15 bp, Homo sapiens
gtaaatcgatagacc

SEQ ID NO: 1892364 - DNA, 15 bp, Homo sapiens
taaatcgatagacct

SEQ ID NO: 1892365 - DNA, 15 bp, Homo sapiens
aaatcgatagacctc

SEQ ID NO: 1892366 - DNA, 15 bp, Homo sapiens
aatcgatagacctcg

SEQ ID NO: 1892367 - DNA, 15 bp, Homo sapiens
atcgatagacctcgc

SEQ ID NO: 1892368 - DNA, 15 bp, Homo sapiens
tcgatagacctcgct

SEQ ID NO: 1892369 - DNA, 15 bp, Homo sapiens
cgatagacctcgctt

SEQ ID NO: 1892370 - DNA, 15 bp, Homo sapiens
gatagacctcgctta

SEQ ID NO: 1892371 - DNA, 15 bp, Homo sapiens
atagacctcgcttag

SEQ ID NO: 1892372 - DNA, 15 bp, Homo sapiens
tagacctcgcttagg

SEQ ID NO: 1892373 - DNA, 15 bp, Homo sapiens
agacctcgcttaggc

SEQ ID NO: 1892374 - DNA, 15 bp, Homo sapiens
gacctcgcttaggca

SEQ ID NO: 1892375 - DNA, 15 bp, Homo sapiens
acctcgcttaggcag

SEQ ID NO: 1892376 - DNA, 15 bp, Homo sapiens
cctcgcttaggcagg

SEQ ID NO: 1892377 - DNA, 15 bp, Homo sapiens
ctcgcttaggcaggc

SEQ ID NO: 1892378 - DNA, 15 bp, Homo sapiens
tcgcttaggcaggcc

SEQ ID NO: 1892379 - DNA, 15 bp, Homo sapiens
cgcttaggcaggcca

SEQ ID NO: 1892380 - DNA, 15 bp, Homo sapiens
gcttaggcaggccag

SEQ ID NO: 1892381 - DNA, 15 bp, Homo sapiens
cttaggcaggccagg

SEQ ID NO: 1892382 - DNA, 15 bp, Homo sapiens
ttaggcaggccagga

SEQ ID NO: 1892383 - DNA, 15 bp, Homo sapiens
taggcaggccaggaa

SEQ ID NO: 1892384 - DNA, 15 bp, Homo sapiens
aggcaggccaggaag

SEQ ID NO: 1892385 - DNA, 15 bp, Homo sapiens
ggcaggccaggaagc

SEQ ID NO: 1892386 - DNA, 15 bp, Homo sapiens
gcaggccaggaagcc

SEQ ID NO: 1892387 - DNA, 15 bp, Homo sapiens
caggccaggaagcct

SEQ ID NO: 1892388 - DNA, 15 bp, Homo sapiens
aggccaggaagcctg

SEQ ID NO: 1892389 - DNA, 15 bp, Homo sapiens
ggccaggaagcctga

SEQ ID NO: 1892390 - DNA, 15 bp, Homo sapiens
gccaggaagcctgaa

SEQ ID NO: 1892391 - DNA, 15 bp, Homo sapiens
ccaggaagcctgaaa

SEQ ID NO: 1892392 - DNA, 15 bp, Homo sapiens
caggaagcctgaaat

SEQ ID NO: 1892393 - DNA, 15 bp, Homo sapiens
aggaagcctgaaatt

SEQ ID NO: 1892394 - DNA, 15 bp, Homo sapiens
ggaagcctgaaattg

SEQ ID NO: 1892395 - DNA, 15 bp, Homo sapiens
gaagcctgaaattgg

SEQ ID NO: 1892396 - DNA, 15 bp, Homo sapiens
aagcctgaaattggc

SEQ ID NO: 1892397 - DNA, 15 bp, Homo sapiens
agcctgaaattggca

SEQ ID NO: 1892398 - DNA, 15 bp, Homo sapiens
gcctgaaattggcaa

SEQ ID NO: 1892399 - DNA, 15 bp, Homo sapiens
cctgaaattggcaaa

SEQ ID NO: 1892400 - DNA, 15 bp, Homo sapiens
ctgaaattggcaaaa

SEQ ID NO: 1892401 - DNA, 15 bp, Homo sapiens
tgaaattggcaaaaa

SEQ ID NO: 1892402 - DNA, 15 bp, Homo sapiens
gaaattggcaaaaag

SEQ ID NO: 1892403 - DNA, 15 bp, Homo sapiens
aaattggcaaaaagt

SEQ ID NO: 1892404 - DNA, 15 bp, Homo sapiens
aattggcaaaaagta

SEQ ID NO: 1892405 - DNA, 15 bp, Homo sapiens
attggcaaaaagtag

SEQ ID NO: 1892406 - DNA, 15 bp, Homo sapiens
ttggcaaaaagtaga

SEQ ID NO: 1892407 - DNA, 15 bp, Homo sapiens
tggcaaaaagtagat

SEQ ID NO: 1892408 - DNA, 15 bp, Homo sapiens
ggcaaaaagtagata

SEQ ID NO: 1892409 - DNA, 15 bp, Homo sapiens
gcaaaaagtagatat

SEQ ID NO: 1892410 - DNA, 15 bp, Homo sapiens
caaaaagtagatatc

SEQ ID NO: 1892411 - DNA, 15 bp, Homo sapiens
aaaaagtagatatcc

SEQ ID NO: 1892412 - DNA, 15 bp, Homo sapiens
aaaagtagatatccc

SEQ ID NO: 1892413 - DNA, 15 bp, Homo sapiens
aaagtagatatcccg

SEQ ID NO: 1892414 - DNA, 15 bp, Homo sapiens
aagtagatatcccgg

SEQ ID NO: 1892415 - DNA, 15 bp, Homo sapiens
agtagatatcccggg

SEQ ID NO: 1892416 - DNA, 15 bp, Homo sapiens
gtagatatcccggga

SEQ ID NO: 1892417 - DNA, 15 bp, Homo sapiens
tagatatcccgggag

SEQ ID NO: 1892418 - DNA, 15 bp, Homo sapiens
agatatcccgggagt

SEQ ID NO: 1892419 - DNA, 15 bp, Homo sapiens
gatatcccgggagtg

SEQ ID NO: 1892420 - DNA, 15 bp, Homo sapiens
atatcccgggagtgt

SEQ ID NO: 1892421 - DNA, 15 bp, Homo sapiens
tatcccgggagtgtt

SEQ ID NO: 1892422 - DNA, 15 bp, Homo sapiens
atcccgggagtgttg

SEQ ID NO: 1892423 - DNA, 15 bp, Homo sapiens
tcccgggagtgttga

SEQ ID NO: 1892424 - DNA, 15 bp, Homo sapiens
cccgggagtgttgac

SEQ ID NO: 1892425 - DNA, 15 bp, Homo sapiens
ccgggagtgttgaca

SEQ ID NO: 1892426 - DNA, 15 bp, Homo sapiens
cgggagtgttgacac

SEQ ID NO: 1892427 - DNA, 15 bp, Homo sapiens
gggagtgttgacaca

SEQ ID NO: 1892428 - DNA, 15 bp, Homo sapiens
ggagtgttgacacat

SEQ ID NO: 1892429 - DNA, 15 bp, Homo sapiens
gagtgttgacacatt

SEQ ID NO: 1892430 - DNA, 15 bp, Homo sapiens
agtgttgacacattt

SEQ ID NO: 1892431 - DNA, 15 bp, Homo sapiens
gtgttgacacatttg

SEQ ID NO: 1892432 - DNA, 15 bp, Homo sapiens
tgttgacacatttga

SEQ ID NO: 1892433 - DNA, 15 bp, Homo sapiens
gttgacacatttgac

SEQ ID NO: 1892434 - DNA, 15 bp, Homo sapiens
ttgacacatttgaca

SEQ ID NO: 1892435 - DNA, 15 bp, Homo sapiens
tgacacatttgacag

SEQ ID NO: 1892436 - DNA, 15 bp, Homo sapiens
gacacatttgacagg

SEQ ID NO: 1892437 - DNA, 15 bp, Homo sapiens
acacatttgacagga

SEQ ID NO: 1892438 - DNA, 15 bp, Homo sapiens
cacatttgacaggaa

SEQ ID NO: 1892439 - DNA, 15 bp, Homo sapiens
acatttgacaggaat

SEQ ID NO: 1892440 - DNA, 15 bp, Homo sapiens
catttgacaggaatt

SEQ ID NO: 1892441 - DNA, 15 bp, Homo sapiens
atttgacaggaattt

SEQ ID NO: 1892442 - DNA, 15 bp, Homo sapiens
tttgacaggaatttc

SEQ ID NO: 1892443 - DNA, 15 bp, Homo sapiens
ttgacaggaatttca

SEQ ID NO: 1892444 - DNA, 15 bp, Homo sapiens
tgacaggaatttcac

SEQ ID NO: 1892445 - DNA, 15 bp, Homo sapiens
gacaggaatttcaca

SEQ ID NO: 1892446 - DNA, 15 bp, Homo sapiens
acaggaatttcacac

SEQ ID NO: 1892447 - DNA, 15 bp, Homo sapiens
caggaatttcacacc

SEQ ID NO: 1892448 - DNA, 15 bp, Homo sapiens
aggaatttcacacca

SEQ ID NO: 1892449 - DNA, 15 bp, Homo sapiens
ggaatttcacaccag

SEQ ID NO: 1892450 - DNA, 15 bp, Homo sapiens
gaatttcacaccagt

SEQ ID NO: 1892451 - DNA, 15 bp, Homo sapiens
aatttcacaccagtt

SEQ ID NO: 1892452 - DNA, 15 bp, Homo sapiens
atttcacaccagtta

SEQ ID NO: 1892453 - DNA, 15 bp, Homo sapiens
tttcacaccagttat

SEQ ID NO: 1892454 - DNA, 15 bp, Homo sapiens
ttcacaccagttatg

SEQ ID NO: 1892455 - DNA, 15 bp, Homo sapiens
tcacaccagttatgg

SEQ ID NO: 1892456 - DNA, 15 bp, Homo sapiens
cacaccagttatggt

SEQ ID NO: 1892457 - DNA, 15 bp, Homo sapiens
acaccagttatggtc

SEQ ID NO: 1892458 - DNA, 15 bp, Homo sapiens
caccagttatggtct

SEQ ID NO: 1892459 - DNA, 15 bp, Homo sapiens
accagttatggtctc

SEQ ID NO: 1892460 - DNA, 15 bp, Homo sapiens
ccagttatggtctca

SEQ ID NO: 1892461 - DNA, 15 bp, Homo sapiens
cagttatggtctcac

SEQ ID NO: 1892462 - DNA, 15 bp, Homo sapiens
agttatggtctcaca

SEQ ID NO: 1892463 - DNA, 15 bp, Homo sapiens
gttatggtctcacat

SEQ ID NO: 1892464 - DNA, 15 bp, Homo sapiens
ttatggtctcacata

SEQ ID NO: 1892465 - DNA, 15 bp, Homo sapiens
tatggtctcacatag

SEQ ID NO: 1892466 - DNA, 15 bp, Homo sapiens
atggtctcacataga

SEQ ID NO: 1892467 - DNA, 15 bp, Homo sapiens
tggtctcacatagac

SEQ ID NO: 1892468 - DNA, 15 bp, Homo sapiens
ggtctcacatagacc

SEQ ID NO: 1892469 - DNA, 15 bp, Homo sapiens
gtctcacatagacca

SEQ ID NO: 1892470 - DNA, 15 bp, Homo sapiens
tctcacatagaccaa

SEQ ID NO: 1892471 - DNA, 15 bp, Homo sapiens
ctcacatagaccaaa

SEQ ID NO: 1892472 - DNA, 15 bp, Homo sapiens
tcacatagaccaaac

SEQ ID NO: 1892473 - DNA, 15 bp, Homo sapiens
cacatagaccaaact

SEQ ID NO: 1892474 - DNA, 15 bp, Homo sapiens
acatagaccaaactc

SEQ ID NO: 1892475 - DNA, 15 bp, Homo sapiens
catagaccaaactca

SEQ ID NO: 1892476 - DNA, 15 bp, Homo sapiens
atagaccaaactcag

SEQ ID NO: 1892477 - DNA, 15 bp, Homo sapiens
tagaccaaactcagg

SEQ ID NO: 1892478 - DNA, 15 bp, Homo sapiens
agaccaaactcagga

SEQ ID NO: 1892479 - DNA, 15 bp, Homo sapiens
gaccaaactcaggaa

SEQ ID NO: 1892480 - DNA, 15 bp, Homo sapiens
accaaactcaggaaa

SEQ ID NO: 1892481 - DNA, 15 bp, Homo sapiens
ccaaactcaggaaat

SEQ ID NO: 1892482 - DNA, 15 bp, Homo sapiens
caaactcaggaaata

SEQ ID NO: 1892483 - DNA, 15 bp, Homo sapiens
aaactcaggaaataa

SEQ ID NO: 1892484 - DNA, 15 bp, Homo sapiens
aactcaggaaataaa

SEQ ID NO: 1892485 - DNA, 15 bp, Homo sapiens
actcaggaaataaat

SEQ ID NO: 1892486 - DNA, 15 bp, Homo sapiens
ctcaggaaataaatg

SEQ ID NO: 1892487 - DNA, 15 bp, Homo sapiens
tcaggaaataaatgt

SEQ ID NO: 1892488 - DNA, 15 bp, Homo sapiens
caggaaataaatgtt

SEQ ID NO: 1892489 - DNA, 15 bp, Homo sapiens
aggaaataaatgttg

SEQ ID NO: 1892490 - DNA, 15 bp, Homo sapiens
ggaaataaatgttgt

SEQ ID NO: 1892491 - DNA, 15 bp, Homo sapiens
gaaataaatgttgtt

SEQ ID NO: 1892492 - DNA, 15 bp, Homo sapiens
aaataaatgttgttg

SEQ ID NO: 1892493 - DNA, 15 bp, Homo sapiens
aataaatgttgttgt

SEQ ID NO: 1892494 - DNA, 15 bp, Homo sapiens
ataaatgttgttgtg

SEQ ID NO: 1892495 - DNA, 15 bp, Homo sapiens
taaatgttgttgtga

SEQ ID NO: 1892496 - DNA, 15 bp, Homo sapiens
aaatgttgttgtgaa

SEQ ID NO: 1892497 - DNA, 15 bp, Homo sapiens
aatgttgttgtgaat

SEQ ID NO: 1892498 - DNA, 15 bp, Homo sapiens
atgttgttgtgaata

SEQ ID NO: 1892499 - DNA, 15 bp, Homo sapiens
tgttgttgtgaataa

SEQ ID NO: 1892500 - DNA, 15 bp, Homo sapiens
gttgttgtgaataaa

SEQ ID NO: 1892501 - DNA, 15 bp, Homo sapiens
ttgttgtgaataaaa

SEQ ID NO: 1892502 - DNA, 15 bp, Homo sapiens
tgttgtgaataaaac

SEQ ID NO: 1892503 - DNA, 15 bp, Homo sapiens
gttgtgaataaaact

SEQ ID NO: 1892504 - DNA, 15 bp, Homo sapiens
ttgtgaataaaactg

SEQ ID NO: 1892505 - DNA, 15 bp, Homo sapiens
tgtgaataaaactgg

SEQ ID NO: 1892506 - DNA, 15 bp, Homo sapiens
gtgaataaaactggt

SEQ ID NO: 1892507 - DNA, 15 bp, Homo sapiens
tgaataaaactggta

SEQ ID NO: 1892508 - DNA, 15 bp, Homo sapiens
gaataaaactggtaa

SEQ ID NO: 1892509 - DNA, 15 bp, Homo sapiens
aataaaactggtaaa

SEQ ID NO: 1892510 - DNA, 15 bp, Homo sapiens
ataaaactggtaaaa

SEQ ID NO: 1892511 - DNA, 15 bp, Homo sapiens
taaaactggtaaaaa

SEQ ID NO: 1892512 - DNA, 15 bp, Homo sapiens
aaaactggtaaaaaa

SEQ ID NO: 1892513 - DNA, 15 bp, Homo sapiens
aaactggtaaaaaaa

SEQ ID NO: 1892514 - DNA, 15 bp, Homo sapiens
aactggtaaaaaaaa

SEQ ID NO: 1892515 - DNA, 15 bp, Homo sapiens
actggtaaaaaaaaa

SEQ ID NO: 1892516 - DNA, 15 bp, Homo sapiens
ctggtaaaaaaaaaa

SEQ ID NO: 1892517 - DNA, 15 bp, Homo sapiens
tggtaaaaaaaaaat

SEQ ID NO: 1892518 - DNA, 15 bp, Homo sapiens
ggtaaaaaaaaaata

SEQ ID NO: 1892519 - DNA, 15 bp, Homo sapiens
gtaaaaaaaaaatac

SEQ ID NO: 1892520 - DNA, 15 bp, Homo sapiens
taaaaaaaaaatact

SEQ ID NO: 1892521 - DNA, 15 bp, Homo sapiens
aaaaaaaaaatacta

SEQ ID NO: 1892522 - DNA, 15 bp, Homo sapiens
aaaaaaaatactaat

SEQ ID NO: 1892523 - DNA, 15 bp, Homo sapiens
aaaaaaatactaatg

SEQ ID NO: 1892524 - DNA, 15 bp, Homo sapiens
aaaaaatactaatgt

SEQ ID NO: 1892525 - DNA, 15 bp, Homo sapiens
aaaaatactaatgtg

SEQ ID NO: 1892526 - DNA, 15 bp, Homo sapiens
aaaatactaatgtgg

SEQ ID NO: 1892527 - DNA, 15 bp, Homo sapiens
aaatactaatgtggc

SEQ ID NO: 1892528 - DNA, 15 bp, Homo sapiens
aatactaatgtggca

SEQ ID NO: 1892529 - DNA, 15 bp, Homo sapiens
atactaatgtggcat

SEQ ID NO: 1892530 - DNA, 15 bp, Homo sapiens
tactaatgtggcatt

SEQ ID NO: 1892531 - DNA, 15 bp, Homo sapiens
actaatgtggcattc

SEQ ID NO: 1892532 - DNA, 15 bp, Homo sapiens
ctaatgtggcattcc

SEQ ID NO: 1892533 - DNA, 15 bp, Homo sapiens
taatgtggcattccg

SEQ ID NO: 1892534 - DNA, 15 bp, Homo sapiens
aatgtggcattccgt

SEQ ID NO: 1892535 - DNA, 15 bp, Homo sapiens
atgtggcattccgtg

SEQ ID NO: 1892536 - DNA, 15 bp, Homo sapiens
tgtggcattccgtgt

SEQ ID NO: 1892537 - DNA, 15 bp, Homo sapiens
gtggcattccgtgtc

SEQ ID NO: 1892538 - DNA, 15 bp, Homo sapiens
tggcattccgtgtct

SEQ ID NO: 1892539 - DNA, 15 bp, Homo sapiens
ggcattccgtgtctc

SEQ ID NO: 1892540 - DNA, 15 bp, Homo sapiens
gcattccgtgtctct

SEQ ID NO: 1892541 - DNA, 15 bp, Homo sapiens
cattccgtgtctcta

SEQ ID NO: 1892542 - DNA, 15 bp, Homo sapiens
attccgtgtctctat

SEQ ID NO: 1892543 - DNA, 15 bp, Homo sapiens
ttccgtgtctctata

SEQ ID NO: 1892544 - DNA, 15 bp, Homo sapiens
tccgtgtctctataa

SEQ ID NO: 1892545 - DNA, 15 bp, Homo sapiens
ccgtgtctctataaa

SEQ ID NO: 1892546 - DNA, 15 bp, Homo sapiens
cgtgtctctataaat

SEQ ID NO: 1892547 - DNA, 15 bp, Homo sapiens
gtgtctctataaatg

SEQ ID NO: 1892548 - DNA, 15 bp, Homo sapiens
tgtctctataaatga

SEQ ID NO: 1892549 - DNA, 15 bp, Homo sapiens
gtctctataaatgaa

SEQ ID NO: 1892550 - DNA, 15 bp, Homo sapiens
tctctataaatgaat

SEQ ID NO: 1892551 - DNA, 15 bp, Homo sapiens
ctctataaatgaatg

SEQ ID NO: 1892552 - DNA, 15 bp, Homo sapiens
tctataaatgaatga

SEQ ID NO: 1892553 - DNA, 15 bp, Homo sapiens
ctataaatgaatgat

SEQ ID NO: 1892554 - DNA, 15 bp, Homo sapiens
tataaatgaatgata

SEQ ID NO: 1892555 - DNA, 15 bp, Homo sapiens
ataaatgaatgatag

SEQ ID NO: 1892556 - DNA, 15 bp, Homo sapiens
taaatgaatgatagt

SEQ ID NO: 1892557 - DNA, 15 bp, Homo sapiens
aaatgaatgatagta

SEQ ID NO: 1892558 - DNA, 15 bp, Homo sapiens
aatgaatgatagtaa

SEQ ID NO: 1892559 - DNA, 15 bp, Homo sapiens
atgaatgatagtaat

SEQ ID NO: 1892560 - DNA, 15 bp, Homo sapiens
tgaatgatagtaatc

SEQ ID NO: 1892561 - DNA, 15 bp, Homo sapiens
gaatgatagtaatca

SEQ ID NO: 1892562 - DNA, 15 bp, Homo sapiens
aatgatagtaatcag

SEQ ID NO: 1892563 - DNA, 15 bp, Homo sapiens
atgatagtaatcagt

SEQ ID NO: 1892564 - DNA, 15 bp, Homo sapiens
tgatagtaatcagta

SEQ ID NO: 1892565 - DNA, 15 bp, Homo sapiens
gatagtaatcagtat

SEQ ID NO: 1892566 - DNA, 15 bp, Homo sapiens
atagtaatcagtatt

SEQ ID NO: 1892567 - DNA, 15 bp, Homo sapiens
tagtaatcagtattg

SEQ ID NO: 1892568 - DNA, 15 bp, Homo sapiens
agtaatcagtattgg

SEQ ID NO: 1892569 - DNA, 15 bp, Homo sapiens
gtaatcagtattggc

SEQ ID NO: 1892570 - DNA, 15 bp, Homo sapiens
taatcagtattggca

SEQ ID NO: 1892571 - DNA, 15 bp, Homo sapiens
aatcagtattggcaa

SEQ ID NO: 1892572 - DNA, 15 bp, Homo sapiens
atcagtattggcaag

SEQ ID NO: 1892573 - DNA, 15 bp, Homo sapiens
tcagtattggcaaga

SEQ ID NO: 1892574 - DNA, 15 bp, Homo sapiens
cagtattggcaagaa

SEQ ID NO: 1892575 - DNA, 15 bp, Homo sapiens
agtattggcaagaaa

SEQ ID NO: 1892576 - DNA, 15 bp, Homo sapiens
gtattggcaagaaaa

SEQ ID NO: 1892577 - DNA, 15 bp, Homo sapiens
tattggcaagaaaat

SEQ ID NO: 1892578 - DNA, 15 bp, Homo sapiens
attggcaagaaaata

SEQ ID NO: 1892579 - DNA, 15 bp, Homo sapiens
ttggcaagaaaataa

SEQ ID NO: 1892580 - DNA, 15 bp, Homo sapiens
tggcaagaaaataat

SEQ ID NO: 1892581 - DNA, 15 bp, Homo sapiens
ggcaagaaaataata

SEQ ID NO: 1892582 - DNA, 15 bp, Homo sapiens
gcaagaaaataatag

SEQ ID NO: 1892583 - DNA, 15 bp, Homo sapiens
caagaaaataataga

SEQ ID NO: 1892584 - DNA, 15 bp, Homo sapiens
aagaaaataatagag

SEQ ID NO: 1892585 - DNA, 15 bp, Homo sapiens
agaaaataatagaga

SEQ ID NO: 1892586 - DNA, 15 bp, Homo sapiens
gaaaataatagagaa

SEQ ID NO: 1892587 - DNA, 15 bp, Homo sapiens
aaaataatagagaaa

SEQ ID NO: 1892588 - DNA, 15 bp, Homo sapiens
aaataatagagaaaa

SEQ ID NO: 1892589 - DNA, 15 bp, Homo sapiens
aataatagagaaaac

SEQ ID NO: 1892590 - DNA, 15 bp, Homo sapiens
ataatagagaaaact

SEQ ID NO: 1892591 - DNA, 15 bp, Homo sapiens
taatagagaaaactt

SEQ ID NO: 1892592 - DNA, 15 bp, Homo sapiens
aatagagaaaacttc

SEQ ID NO: 1892593 - DNA, 15 bp, Homo sapiens
atagagaaaacttca

SEQ ID NO: 1892594 - DNA, 15 bp, Homo sapiens
tagagaaaacttcaa

SEQ ID NO: 1892595 - DNA, 15 bp, Homo sapiens
agagaaaacttcaaa

SEQ ID NO: 1892596 - DNA, 15 bp, Homo sapiens
gagaaaacttcaaaa

SEQ ID NO: 1892597 - DNA, 15 bp, Homo sapiens
agaaaacttcaaaat

SEQ ID NO: 1892598 - DNA, 15 bp, Homo sapiens
gaaaacttcaaaata

SEQ ID NO: 1892599 - DNA, 15 bp, Homo sapiens
aaaacttcaaaatat

SEQ ID NO: 1892600 - DNA, 15 bp, Homo sapiens
aaacttcaaaatatg

SEQ ID NO: 1892601 - DNA, 15 bp, Homo sapiens
aacttcaaaatatga

SEQ ID NO: 1892602 - DNA, 15 bp, Homo sapiens
acttcaaaatatgaa

SEQ ID NO: 1892603 - DNA, 15 bp, Homo sapiens
cttcaaaatatgaag

SEQ ID NO: 1892604 - DNA, 15 bp, Homo sapiens
ttcaaaatatgaaga

SEQ ID NO: 1892605 - DNA, 15 bp, Homo sapiens
tcaaaatatgaagaa

SEQ ID NO: 1892606 - DNA, 15 bp, Homo sapiens
caaaatatgaagaag

SEQ ID NO: 1892607 - DNA, 15 bp, Homo sapiens
aaaatatgaagaagt

SEQ ID NO: 1892608 - DNA, 15 bp, Homo sapiens
aaatatgaagaagta

SEQ ID NO: 1892609 - DNA, 15 bp, Homo sapiens
aatatgaagaagtat

SEQ ID NO: 1892610 - DNA, 15 bp, Homo sapiens
atatgaagaagtatt

SEQ ID NO: 1892611 - DNA, 15 bp, Homo sapiens
tatgaagaagtattt

SEQ ID NO: 1892612 - DNA, 15 bp, Homo sapiens
atgaagaagtatttt

SEQ ID NO: 1892613 - DNA, 15 bp, Homo sapiens
tgaagaagtattttg

SEQ ID NO: 1892614 - DNA, 15 bp, Homo sapiens
gaagaagtattttgc

SEQ ID NO: 1892615 - DNA, 15 bp, Homo sapiens
aagaagtattttgct

SEQ ID NO: 1892616 - DNA, 15 bp, Homo sapiens
agaagtattttgctt

SEQ ID NO: 1892617 - DNA, 15 bp, Homo sapiens
gaagtattttgcttt

SEQ ID NO: 1892618 - DNA, 15 bp, Homo sapiens
aagtattttgctttg

SEQ ID NO: 1892619 - DNA, 15 bp, Homo sapiens
agtattttgctttgt

SEQ ID NO: 1892620 - DNA, 15 bp, Homo sapiens
gtattttgctttgta

SEQ ID NO: 1892621 - DNA, 15 bp, Homo sapiens
tattttgctttgtac

SEQ ID NO: 1892622 - DNA, 15 bp, Homo sapiens
attttgctttgtacc

SEQ ID NO: 1892623 - DNA, 15 bp, Homo sapiens
ttttgctttgtacca

SEQ ID NO: 1892624 - DNA, 15 bp, Homo sapiens
tttgctttgtaccat

SEQ ID NO: 1892625 - DNA, 15 bp, Homo sapiens
ttgctttgtaccatt

SEQ ID NO: 1892626 - DNA, 15 bp, Homo sapiens
tgctttgtaccattt

SEQ ID NO: 1892627 - DNA, 15 bp, Homo sapiens
gctttgtaccatttt

SEQ ID NO: 1892628 - DNA, 15 bp, Homo sapiens
ctttgtaccatttta

SEQ ID NO: 1892629 - DNA, 15 bp, Homo sapiens
tttgtaccattttaa

SEQ ID NO: 1892630 - DNA, 15 bp, Homo sapiens
ttgtaccattttaat

SEQ ID NO: 1892631 - DNA, 15 bp, Homo sapiens
tgtaccattttaata

SEQ ID NO: 1892632 - DNA, 15 bp, Homo sapiens
gtaccattttaataa

SEQ ID NO: 1892633 - DNA, 15 bp, Homo sapiens
taccattttaataag

SEQ ID NO: 1892634 - DNA, 15 bp, Homo sapiens
accattttaataagt

SEQ ID NO: 1892635 - DNA, 15 bp, Homo sapiens
ccattttaataagtg

SEQ ID NO: 1892636 - DNA, 15 bp, Homo sapiens
cattttaataagtgt

SEQ ID NO: 1892637 - DNA, 15 bp, Homo sapiens
attttaataagtgta

SEQ ID NO: 1892638 - DNA, 15 bp, Homo sapiens
ttttaataagtgtat

SEQ ID NO: 1892639 - DNA, 15 bp, Homo sapiens
tttaataagtgtata

SEQ ID NO: 1892640 - DNA, 15 bp, Homo sapiens
ttaataagtgtatat

SEQ ID NO: 1892641 - DNA, 15 bp, Homo sapiens
taataagtgtatata

SEQ ID NO: 1892642 - DNA, 15 bp, Homo sapiens
aataagtgtatatag

SEQ ID NO: 1892643 - DNA, 15 bp, Homo sapiens
ataagtgtatatagt

SEQ ID NO: 1892644 - DNA, 15 bp, Homo sapiens
taagtgtatatagta

SEQ ID NO: 1892645 - DNA, 15 bp, Homo sapiens
aagtgtatatagtag

SEQ ID NO: 1892646 - DNA, 15 bp, Homo sapiens
agtgtatatagtaga

SEQ ID NO: 1892647 - DNA, 15 bp, Homo sapiens
gtgtatatagtagaa

SEQ ID NO: 1892648 - DNA, 15 bp, Homo sapiens
tgtatatagtagaaa

SEQ ID NO: 1892649 - DNA, 15 bp, Homo sapiens
gtatatagtagaaaa

SEQ ID NO: 1892650 - DNA, 15 bp, Homo sapiens
tatatagtagaaaat

SEQ ID NO: 1892651 - DNA, 15 bp, Homo sapiens
atatagtagaaaata

SEQ ID NO: 1892652 - DNA, 15 bp, Homo sapiens
tatagtagaaaatat

SEQ ID NO: 1892653 - DNA, 15 bp, Homo sapiens
atagtagaaaatatt

SEQ ID NO: 1892654 - DNA, 15 bp, Homo sapiens
tagtagaaaatattt

SEQ ID NO: 1892655 - DNA, 15 bp, Homo sapiens
agtagaaaatatttg

SEQ ID NO: 1892656 - DNA, 15 bp, Homo sapiens
gtagaaaatatttgt

SEQ ID NO: 1892657 - DNA, 15 bp, Homo sapiens
agaaaatatttgtct

SEQ ID NO: 1892658 - DNA, 15 bp, Homo sapiens
gaaaatatttgtctt

SEQ ID NO: 1892659 - DNA, 15 bp, Homo sapiens
aaaatatttgtctta

SEQ ID NO: 1892660 - DNA, 15 bp, Homo sapiens
aaatatttgtcttag

SEQ ID NO: 1892661 - DNA, 15 bp, Homo sapiens
aatatttgtcttagt

SEQ ID NO: 1892662 - DNA, 15 bp, Homo sapiens
atatttgtcttagtt

SEQ ID NO: 1892663 - DNA, 15 bp, Homo sapiens
tatttgtcttagtta

SEQ ID NO: 1892664 - DNA, 15 bp, Homo sapiens
atttgtcttagttat

SEQ ID NO: 1892665 - DNA, 15 bp, Homo sapiens
tttgtcttagttatt

SEQ ID NO: 1892666 - DNA, 15 bp, Homo sapiens
ttgtcttagttatta

SEQ ID NO: 1892667 - DNA, 15 bp, Homo sapiens
tgtcttagttattaa

SEQ ID NO: 1892668 - DNA, 15 bp, Homo sapiens
gtcttagttattaac

SEQ ID NO: 1892669 - DNA, 15 bp, Homo sapiens
tcttagttattaacc

SEQ ID NO: 1892670 - DNA, 15 bp, Homo sapiens
cttagttattaacca

SEQ ID NO: 1892671 - DNA, 15 bp, Homo sapiens
ttagttattaaccac

SEQ ID NO: 1892672 - DNA, 15 bp, Homo sapiens
tagttattaaccaca

SEQ ID NO: 1892673 - DNA, 15 bp, Homo sapiens
agttattaaccacat

SEQ ID NO: 1892674 - DNA, 15 bp, Homo sapiens
gttattaaccacatg

SEQ ID NO: 1892675 - DNA, 15 bp, Homo sapiens
ttattaaccacatgg

SEQ ID NO: 1892676 - DNA, 15 bp, Homo sapiens
tattaaccacatggt

SEQ ID NO: 1892677 - DNA, 15 bp, Homo sapiens
attaaccacatggtt

SEQ ID NO: 1892678 - DNA, 15 bp, Homo sapiens
ttaaccacatggttg

SEQ ID NO: 1892679 - DNA, 15 bp, Homo sapiens
taaccacatggttga

SEQ ID NO: 1892680 - DNA, 15 bp, Homo sapiens
aaccacatggttgac

SEQ ID NO: 1892681 - DNA, 15 bp, Homo sapiens
accacatggttgacc

SEQ ID NO: 1892682 - DNA, 15 bp, Homo sapiens
ccacatggttgacca

SEQ ID NO: 1892683 - DNA, 15 bp, Homo sapiens
cacatggttgaccaa

SEQ ID NO: 1892684 - DNA, 15 bp, Homo sapiens
acatggttgaccaat

SEQ ID NO: 1892685 - DNA, 15 bp, Homo sapiens
catggttgaccaatt

SEQ ID NO: 1892686 - DNA, 15 bp, Homo sapiens
atggttgaccaattt

SEQ ID NO: 1892687 - DNA, 15 bp, Homo sapiens
tggttgaccaattta

SEQ ID NO: 1892688 - DNA, 15 bp, Homo sapiens
ggttgaccaatttat

SEQ ID NO: 1892689 - DNA, 15 bp, Homo sapiens
gttgaccaatttata

SEQ ID NO: 1892690 - DNA, 15 bp, Homo sapiens
ttgaccaatttataa

SEQ ID NO: 1892691 - DNA, 15 bp, Homo sapiens
tgaccaatttataaa

SEQ ID NO: 1892692 - DNA, 15 bp, Homo sapiens
gaccaatttataaat

SEQ ID NO: 1892693 - DNA, 15 bp, Homo sapiens
accaatttataaata

SEQ ID NO: 1892694 - DNA, 15 bp, Homo sapiens
ccaatttataaatac

SEQ ID NO: 1892695 - DNA, 15 bp, Homo sapiens
caatttataaatacc

SEQ ID NO: 1892696 - DNA, 15 bp, Homo sapiens
aatttataaataccc

SEQ ID NO: 1892697 - DNA, 15 bp, Homo sapiens
atttataaataccca

SEQ ID NO: 1892698 - DNA, 15 bp, Homo sapiens
tttataaatacccaa

SEQ ID NO: 1892699 - DNA, 15 bp, Homo sapiens
ttataaatacccaat

SEQ ID NO: 1892700 - DNA, 15 bp, Homo sapiens
tataaatacccaata

SEQ ID NO: 1892701 - DNA, 15 bp, Homo sapiens
ataaatacccaatat

SEQ ID NO: 1892702 - DNA, 15 bp, Homo sapiens
taaatacccaatatt

SEQ ID NO: 1892703 - DNA, 15 bp, Homo sapiens
aaatacccaatattt

SEQ ID NO: 1892704 - DNA, 15 bp, Homo sapiens
aatacccaatatttc

SEQ ID NO: 1892705 - DNA, 15 bp, Homo sapiens
atacccaatatttcc

SEQ ID NO: 1892706 - DNA, 15 bp, Homo sapiens
tacccaatatttcca

SEQ ID NO: 1892707 - DNA, 15 bp, Homo sapiens
acccaatatttccaa

SEQ ID NO: 1892708 - DNA, 15 bp, Homo sapiens
cccaatatttccaat

SEQ ID NO: 1892709 - DNA, 15 bp, Homo sapiens
ccaatatttccaatt

SEQ ID NO: 1892710 - DNA, 15 bp, Homo sapiens
caatatttccaattt

SEQ ID NO: 1892711 - DNA, 15 bp, Homo sapiens
tatttccaatttttt

SEQ ID NO: 1892712 - DNA, 15 bp, Homo sapiens
atttccaattttttt

SEQ ID NO: 1892713 - DNA, 15 bp, Homo sapiens
tttccaatttttttt

SEQ ID NO: 1892714 - DNA, 15 bp, Homo sapiens
ttccaattttttttc

SEQ ID NO: 1892715 - DNA, 15 bp, Homo sapiens
tccaattttttttcc

SEQ ID NO: 1892716 - DNA, 15 bp, Homo sapiens
ccaattttttttcct

SEQ ID NO: 1892717 - DNA, 15 bp, Homo sapiens
caattttttttcctg

SEQ ID NO: 1892718 - DNA, 15 bp, Homo sapiens
aattttttttcctga

SEQ ID NO: 1892719 - DNA, 15 bp, Homo sapiens
attttttttcctgaa

SEQ ID NO: 1892720 - DNA, 15 bp, Homo sapiens
ttttttttcctgaaa

SEQ ID NO: 1892721 - DNA, 15 bp, Homo sapiens
tttttttcctgaaat

SEQ ID NO: 1892722 - DNA, 15 bp, Homo sapiens
ttttttcctgaaatt

SEQ ID NO: 1892723 - DNA, 15 bp, Homo sapiens
tttttcctgaaattg

SEQ ID NO: 1892724 - DNA, 15 bp, Homo sapiens
ttttcctgaaattga

SEQ ID NO: 1892725 - DNA, 15 bp, Homo sapiens
tttcctgaaattgat

SEQ ID NO: 1892726 - DNA, 15 bp, Homo sapiens
ttcctgaaattgatt

SEQ ID NO: 1892727 - DNA, 15 bp, Homo sapiens
tcctgaaattgattt

SEQ ID NO: 1892728 - DNA, 15 bp, Homo sapiens
cctgaaattgatttt

SEQ ID NO: 1892729 - DNA, 15 bp, Homo sapiens
ctgaaattgatttta

SEQ ID NO: 1892730 - DNA, 15 bp, Homo sapiens
tgaaattgattttaa

SEQ ID NO: 1892731 - DNA, 15 bp, Homo sapiens
gaaattgattttaag

SEQ ID NO: 1892732 - DNA, 15 bp, Homo sapiens
aaattgattttaagg

SEQ ID NO: 1892733 - DNA, 15 bp, Homo sapiens
aattgattttaaggg

SEQ ID NO: 1892734 - DNA, 15 bp, Homo sapiens
attgattttaaggga

SEQ ID NO: 1892735 - DNA, 15 bp, Homo sapiens
ttgattttaagggaa

SEQ ID NO: 1892736 - DNA, 15 bp, Homo sapiens
tgattttaagggaat

SEQ ID NO: 1892737 - DNA, 15 bp, Homo sapiens
gattttaagggaatc

SEQ ID NO: 1892738 - DNA, 15 bp, Homo sapiens
attttaagggaatca

SEQ ID NO: 1892739 - DNA, 15 bp, Homo sapiens
ttttaagggaatcaa

SEQ ID NO: 1892740 - DNA, 15 bp, Homo sapiens
tttaagggaatcaaa

SEQ ID NO: 1892741 - DNA, 15 bp, Homo sapiens
ttaagggaatcaaat

SEQ ID NO: 1892742 - DNA, 15 bp, Homo sapiens
taagggaatcaaatc

SEQ ID NO: 1892743 - DNA, 15 bp, Homo sapiens
aagggaatcaaatca

SEQ ID NO: 1892744 - DNA, 15 bp, Homo sapiens
agggaatcaaatcag

SEQ ID NO: 1892745 - DNA, 15 bp, Homo sapiens
gggaatcaaatcaga

SEQ ID NO: 1892746 - DNA, 15 bp, Homo sapiens
ggaatcaaatcagag

SEQ ID NO: 1892747 - DNA, 15 bp, Homo sapiens
gaatcaaatcagagc

SEQ ID NO: 1892748 - DNA, 15 bp, Homo sapiens
aatcaaatcagagca

SEQ ID NO: 1892749 - DNA, 15 bp, Homo sapiens
atcaaatcagagcag

SEQ ID NO: 1892750 - DNA, 15 bp, Homo sapiens
tcaaatcagagcagg

SEQ ID NO: 1892751 - DNA, 15 bp, Homo sapiens
caaatcagagcaggg

SEQ ID NO: 1892752 - DNA, 15 bp, Homo sapiens
aaatcagagcaggga

SEQ ID NO: 1892753 - DNA, 15 bp, Homo sapiens
aatcagagcagggaa

SEQ ID NO: 1892754 - DNA, 15 bp, Homo sapiens
atcagagcagggaat

SEQ ID NO: 1892755 - DNA, 15 bp, Homo sapiens
tcagagcagggaata

SEQ ID NO: 1892756 - DNA, 15 bp, Homo sapiens
cagagcagggaatat

SEQ ID NO: 1892757 - DNA, 15 bp, Homo sapiens
agagcagggaatatt

SEQ ID NO: 1892758 - DNA, 15 bp, Homo sapiens
gagcagggaatattt

SEQ ID NO: 1892759 - DNA, 15 bp, Homo sapiens
agcagggaatatttc

SEQ ID NO: 1892760 - DNA, 15 bp, Homo sapiens
gcagggaatatttct

SEQ ID NO: 1892761 - DNA, 15 bp, Homo sapiens
cagggaatatttctg

SEQ ID NO: 1892762 - DNA, 15 bp, Homo sapiens
agggaatatttctgt

SEQ ID NO: 1892763 - DNA, 15 bp, Homo sapiens
gggaatatttctgta

SEQ ID NO: 1892764 - DNA, 15 bp, Homo sapiens
ggaatatttctgtaa

SEQ ID NO: 1892765 - DNA, 15 bp, Homo sapiens
gaatatttctgtaat

SEQ ID NO: 1892766 - DNA, 15 bp, Homo sapiens
aatatttctgtaatc

SEQ ID NO: 1892767 - DNA, 15 bp, Homo sapiens
atatttctgtaatct

SEQ ID NO: 1892768 - DNA, 15 bp, Homo sapiens
tatttctgtaatctt

SEQ ID NO: 1892769 - DNA, 15 bp, Homo sapiens
atttctgtaatcttt

SEQ ID NO: 1892770 - DNA, 15 bp, Homo sapiens
tttctgtaatctttt

SEQ ID NO: 1892771 - DNA, 15 bp, Homo sapiens
ttctgtaatctttta

SEQ ID NO: 1892772 - DNA, 15 bp, Homo sapiens
tctgtaatcttttat

SEQ ID NO: 1892773 - DNA, 15 bp, Homo sapiens
ctgtaatcttttatt

SEQ ID NO: 1892774 - DNA, 15 bp, Homo sapiens
tgtaatcttttattc

SEQ ID NO: 1892775 - DNA, 15 bp, Homo sapiens
gtaatcttttattca

SEQ ID NO: 1892776 - DNA, 15 bp, Homo sapiens
taatcttttattcag

SEQ ID NO: 1892777 - DNA, 15 bp, Homo sapiens
aatcttttattcagg

SEQ ID NO: 1892778 - DNA, 15 bp, Homo sapiens
atcttttattcagga

SEQ ID NO: 1892779 - DNA, 15 bp, Homo sapiens
tcttttattcaggag

SEQ ID NO: 1892780 - DNA, 15 bp, Homo sapiens
cttttattcaggaga

SEQ ID NO: 1892781 - DNA, 15 bp, Homo sapiens
ttttattcaggagat

SEQ ID NO: 1892782 - DNA, 15 bp, Homo sapiens
tttattcaggagatg

SEQ ID NO: 1892783 - DNA, 15 bp, Homo sapiens
ttattcaggagatga

SEQ ID NO: 1892784 - DNA, 15 bp, Homo sapiens
tattcaggagatgaa

SEQ ID NO: 1892785 - DNA, 15 bp, Homo sapiens
attcaggagatgaat

SEQ ID NO: 1892786 - DNA, 15 bp, Homo sapiens
ttcaggagatgaatg

SEQ ID NO: 1892787 - DNA, 15 bp, Homo sapiens
tcaggagatgaatgt

SEQ ID NO: 1892788 - DNA, 15 bp, Homo sapiens
caggagatgaatgtg

SEQ ID NO: 1892789 - DNA, 15 bp, Homo sapiens
aggagatgaatgtgt

SEQ ID NO: 1892790 - DNA, 15 bp, Homo sapiens
ggagatgaatgtgta

SEQ ID NO: 1892791 - DNA, 15 bp, Homo sapiens
gagatgaatgtgtat

SEQ ID NO: 1892792 - DNA, 15 bp, Homo sapiens
agatgaatgtgtatt

SEQ ID NO: 1892793 - DNA, 15 bp, Homo sapiens
gatgaatgtgtattt

SEQ ID NO: 1892794 - DNA, 15 bp, Homo sapiens
atgaatgtgtattta

SEQ ID NO: 1892795 - DNA, 15 bp, Homo sapiens
tgaatgtgtatttat

SEQ ID NO: 1892796 - DNA, 15 bp, Homo sapiens
gaatgtgtatttatt

SEQ ID NO: 1892797 - DNA, 15 bp, Homo sapiens
aatgtgtatttatta

SEQ ID NO: 1892798 - DNA, 15 bp, Homo sapiens
atgtgtatttattat

SEQ ID NO: 1892799 - DNA, 15 bp, Homo sapiens
tgtgtatttattatt

SEQ ID NO: 1892800 - DNA, 15 bp, Homo sapiens
gtgtatttattattt

SEQ ID NO: 1892801 - DNA, 15 bp, Homo sapiens
tgtatttattattta

SEQ ID NO: 1892802 - DNA, 15 bp, Homo sapiens
gtatttattatttac

SEQ ID NO: 1892803 - DNA, 15 bp, Homo sapiens
tatttattatttacc

SEQ ID NO: 1892804 - DNA, 15 bp, Homo sapiens
atttattatttacct

SEQ ID NO: 1892805 - DNA, 15 bp, Homo sapiens
tttattatttaccta

SEQ ID NO: 1892806 - DNA, 15 bp, Homo sapiens
ttattatttacctat

SEQ ID NO: 1892807 - DNA, 15 bp, Homo sapiens
tattatttacctata

SEQ ID NO: 1892808 - DNA, 15 bp, Homo sapiens
attatttacctatat

SEQ ID NO: 1892809 - DNA, 15 bp, Homo sapiens
ttatttacctatatt

SEQ ID NO: 1892810 - DNA, 15 bp, Homo sapiens
tatttacctatattt

SEQ ID NO: 1892811 - DNA, 15 bp, Homo sapiens
atttacctatattta

SEQ ID NO: 1892812 - DNA, 15 bp, Homo sapiens
tttacctatatttaa

SEQ ID NO: 1892813 - DNA, 15 bp, Homo sapiens
ttacctatatttaac

SEQ ID NO: 1892814 - DNA, 15 bp, Homo sapiens
tacctatatttaact

SEQ ID NO: 1892815 - DNA, 15 bp, Homo sapiens
acctatatttaactc

SEQ ID NO: 1892816 - DNA, 15 bp, Homo sapiens
cctatatttaactcc

SEQ ID NO: 1892817 - DNA, 15 bp, Homo sapiens
ctatatttaactccc

SEQ ID NO: 1892818 - DNA, 15 bp, Homo sapiens
tatatttaactccct

SEQ ID NO: 1892819 - DNA, 15 bp, Homo sapiens
atatttaactccctg

SEQ ID NO: 1892820 - DNA, 15 bp, Homo sapiens
tatttaactccctgc

SEQ ID NO: 1892821 - DNA, 15 bp, Homo sapiens
atttaactccctgct

SEQ ID NO: 1892822 - DNA, 15 bp, Homo sapiens
tttaactccctgctc

SEQ ID NO: 1892823 - DNA, 15 bp, Homo sapiens
ttaactccctgctct

SEQ ID NO: 1892824 - DNA, 15 bp, Homo sapiens
taactccctgctctt

SEQ ID NO: 1892825 - DNA, 15 bp, Homo sapiens
aactccctgctcttt

SEQ ID NO: 1892826 - DNA, 15 bp, Homo sapiens
actccctgctctttt

SEQ ID NO: 1892827 - DNA, 15 bp, Homo sapiens
ctccctgctctttta

SEQ ID NO: 1892828 - DNA, 15 bp, Homo sapiens
tccctgctcttttag

SEQ ID NO: 1892829 - DNA, 15 bp, Homo sapiens
ccctgctcttttagt

SEQ ID NO: 1892830 - DNA, 15 bp, Homo sapiens
cctgctcttttagta

SEQ ID NO: 1892831 - DNA, 15 bp, Homo sapiens
ctgctcttttagtat

SEQ ID NO: 1892832 - DNA, 15 bp, Homo sapiens
tgctcttttagtatc

SEQ ID NO: 1892833 - DNA, 15 bp, Homo sapiens
gctcttttagtatct

SEQ ID NO: 1892834 - DNA, 15 bp, Homo sapiens
ctcttttagtatcta

SEQ ID NO: 1892835 - DNA, 15 bp, Homo sapiens
tcttttagtatctac

SEQ ID NO: 1892836 - DNA, 15 bp, Homo sapiens
cttttagtatctaca

SEQ ID NO: 1892837 - DNA, 15 bp, Homo sapiens
ttttagtatctacat

SEQ ID NO: 1892838 - DNA, 15 bp, Homo sapiens
tttagtatctacatg

SEQ ID NO: 1892839 - DNA, 15 bp, Homo sapiens
ttagtatctacatgc

SEQ ID NO: 1892840 - DNA, 15 bp, Homo sapiens
tagtatctacatgct

SEQ ID NO: 1892841 - DNA, 15 bp, Homo sapiens
agtatctacatgctg

SEQ ID NO: 1892842 - DNA, 15 bp, Homo sapiens
gtatctacatgctgt

SEQ ID NO: 1892843 - DNA, 15 bp, Homo sapiens
tatctacatgctgta

SEQ ID NO: 1892844 - DNA, 15 bp, Homo sapiens
atctacatgctgtat

SEQ ID NO: 1892845 - DNA, 15 bp, Homo sapiens
tctacatgctgtatt

SEQ ID NO: 1892846 - DNA, 15 bp, Homo sapiens
ctacatgctgtatta

SEQ ID NO: 1892847 - DNA, 15 bp, Homo sapiens
tacatgctgtattac

SEQ ID NO: 1892848 - DNA, 15 bp, Homo sapiens
acatgctgtattacg

SEQ ID NO: 1892849 - DNA, 15 bp, Homo sapiens
catgctgtattacgt

SEQ ID NO: 1892850 - DNA, 15 bp, Homo sapiens
atgctgtattacgta

SEQ ID NO: 1892851 - DNA, 15 bp, Homo sapiens
tgctgtattacgtaa

SEQ ID NO: 1892852 - DNA, 15 bp, Homo sapiens
gctgtattacgtaat

SEQ ID NO: 1892853 - DNA, 15 bp, Homo sapiens
ctgtattacgtaatt

SEQ ID NO: 1892854 - DNA, 15 bp, Homo sapiens
tgtattacgtaatta

SEQ ID NO: 1892855 - DNA, 15 bp, Homo sapiens
gtattacgtaattat

SEQ ID NO: 1892856 - DNA, 15 bp, Homo sapiens
tattacgtaattatc

SEQ ID NO: 1892857 - DNA, 15 bp, Homo sapiens
attacgtaattatca

SEQ ID NO: 1892858 - DNA, 15 bp, Homo sapiens
ttacgtaattatcat

SEQ ID NO: 1892859 - DNA, 15 bp, Homo sapiens
tacgtaattatcatc

SEQ ID NO: 1892860 - DNA, 15 bp, Homo sapiens
acgtaattatcatct

SEQ ID NO: 1892861 - DNA, 15 bp, Homo sapiens
cgtaattatcatctt

SEQ ID NO: 1892862 - DNA, 15 bp, Homo sapiens
gtaattatcatcttc

SEQ ID NO: 1892863 - DNA, 15 bp, Homo sapiens
taattatcatcttct

SEQ ID NO: 1892864 - DNA, 15 bp, Homo sapiens
aattatcatcttctc

SEQ ID NO: 1892865 - DNA, 15 bp, Homo sapiens
attatcatcttctct

SEQ ID NO: 1892866 - DNA, 15 bp, Homo sapiens
ttatcatcttctctg

SEQ ID NO: 1892867 - DNA, 15 bp, Homo sapiens
tatcatcttctctga

SEQ ID NO: 1892868 - DNA, 15 bp, Homo sapiens
atcatcttctctgag

SEQ ID NO: 1892869 - DNA, 15 bp, Homo sapiens
tcatcttctctgagg

SEQ ID NO: 1892870 - DNA, 15 bp, Homo sapiens
catcttctctgaggg

SEQ ID NO: 1892871 - DNA, 15 bp, Homo sapiens
atcttctctgaggga

SEQ ID NO: 1892872 - DNA, 15 bp, Homo sapiens
tcttctctgagggag

SEQ ID NO: 1892873 - DNA, 15 bp, Homo sapiens
cttctctgagggagg

SEQ ID NO: 1892874 - DNA, 15 bp, Homo sapiens
ttctctgagggagga

SEQ ID NO: 1892875 - DNA, 15 bp, Homo sapiens
tctctgagggaggaa

SEQ ID NO: 1892876 - DNA, 15 bp, Homo sapiens
ctctgagggaggaaa

SEQ ID NO: 1892877 - DNA, 15 bp, Homo sapiens
tctgagggaggaaaa

SEQ ID NO: 1892878 - DNA, 15 bp, Homo sapiens
ctgagggaggaaaaa

SEQ ID NO: 1892879 - DNA, 15 bp, Homo sapiens
tgagggaggaaaaaa

SEQ ID NO: 1892880 - DNA, 15 bp, Homo sapiens
gagggaggaaaaaaa

SEQ ID NO: 1892881 - DNA, 15 bp, Homo sapiens
agggaggaaaaaaag

SEQ ID NO: 1892882 - DNA, 15 bp, Homo sapiens
gggaggaaaaaaagt

SEQ ID NO: 1892883 - DNA, 15 bp, Homo sapiens
ggaggaaaaaaagta

SEQ ID NO: 1892884 - DNA, 15 bp, Homo sapiens
gaggaaaaaaagtag

SEQ ID NO: 1892885 - DNA, 15 bp, Homo sapiens
aggaaaaaaagtagc

SEQ ID NO: 1892886 - DNA, 15 bp, Homo sapiens
ggaaaaaaagtagct

SEQ ID NO: 1892887 - DNA, 15 bp, Homo sapiens
gaaaaaaagtagctg

SEQ ID NO: 1892888 - DNA, 15 bp, Homo sapiens
aaaaaaagtagctga

SEQ ID NO: 1892889 - DNA, 15 bp, Homo sapiens
aaaaaagtagctgag

SEQ ID NO: 1892890 - DNA, 15 bp, Homo sapiens
aaaaagtagctgaga

SEQ ID NO: 1892891 - DNA, 15 bp, Homo sapiens
aaaagtagctgagag

SEQ ID NO: 1892892 - DNA, 15 bp, Homo sapiens
aaagtagctgagagc

SEQ ID NO: 1892893 - DNA, 15 bp, Homo sapiens
aagtagctgagagcc

SEQ ID NO: 1892894 - DNA, 15 bp, Homo sapiens
agtagctgagagcca

SEQ ID NO: 1892895 - DNA, 15 bp, Homo sapiens
gtagctgagagccac

SEQ ID NO: 1892896 - DNA, 15 bp, Homo sapiens
tagctgagagccact

SEQ ID NO: 1892897 - DNA, 15 bp, Homo sapiens
agctgagagccactt

SEQ ID NO: 1892898 - DNA, 15 bp, Homo sapiens
gctgagagccacttt

SEQ ID NO: 1892899 - DNA, 15 bp, Homo sapiens
ctgagagccactttc

SEQ ID NO: 1892900 - DNA, 15 bp, Homo sapiens
tgagagccactttca

SEQ ID NO: 1892901 - DNA, 15 bp, Homo sapiens
gagagccactttcag

SEQ ID NO: 1892902 - DNA, 15 bp, Homo sapiens
agagccactttcagt

SEQ ID NO: 1892903 - DNA, 15 bp, Homo sapiens
gagccactttcagtc

SEQ ID NO: 1892904 - DNA, 15 bp, Homo sapiens
agccactttcagtcc

SEQ ID NO: 1892905 - DNA, 15 bp, Homo sapiens
gccactttcagtccc

SEQ ID NO: 1892906 - DNA, 15 bp, Homo sapiens
ccactttcagtcccg

SEQ ID NO: 1892907 - DNA, 15 bp, Homo sapiens
cactttcagtcccgc

SEQ ID NO: 1892908 - DNA, 15 bp, Homo sapiens
actttcagtcccgct

SEQ ID NO: 1892909 - DNA, 15 bp, Homo sapiens
ctttcagtcccgcta

SEQ ID NO: 1892910 - DNA, 15 bp, Homo sapiens
tttcagtcccgctat

SEQ ID NO: 1892911 - DNA, 15 bp, Homo sapiens
ttcagtcccgctatt

SEQ ID NO: 1892912 - DNA, 15 bp, Homo sapiens
tcagtcccgctatta

SEQ ID NO: 1892913 - DNA, 15 bp, Homo sapiens
cagtcccgctattaa

SEQ ID NO: 1892914 - DNA, 15 bp, Homo sapiens
agtcccgctattaag

SEQ ID NO: 1892915 - DNA, 15 bp, Homo sapiens
gtcccgctattaagt

SEQ ID NO: 1892916 - DNA, 15 bp, Homo sapiens
tcccgctattaagta

SEQ ID NO: 1892917 - DNA, 15 bp, Homo sapiens
cccgctattaagtac

SEQ ID NO: 1892918 - DNA, 15 bp, Homo sapiens
ccgctattaagtaca

SEQ ID NO: 1892919 - DNA, 15 bp, Homo sapiens
cgctattaagtacat

SEQ ID NO: 1892920 - DNA, 15 bp, Homo sapiens
gctattaagtacatt

SEQ ID NO: 1892921 - DNA, 15 bp, Homo sapiens
ctattaagtacattt

SEQ ID NO: 1892922 - DNA, 15 bp, Homo sapiens
tattaagtacatttt

SEQ ID NO: 1892923 - DNA, 15 bp, Homo sapiens
attaagtacattttg

SEQ ID NO: 1892924 - DNA, 15 bp, Homo sapiens
ttaagtacattttgg

SEQ ID NO: 1892925 - DNA, 15 bp, Homo sapiens
taagtacattttggc

SEQ ID NO: 1892926 - DNA, 15 bp, Homo sapiens
aagtacattttggcc

SEQ ID NO: 1892927 - DNA, 15 bp, Homo sapiens
agtacattttggcct

SEQ ID NO: 1892928 - DNA, 15 bp, Homo sapiens
gtacattttggcctc

SEQ ID NO: 1892929 - DNA, 15 bp, Homo sapiens
tacattttggcctct

SEQ ID NO: 1892930 - DNA, 15 bp, Homo sapiens
acattttggcctcta

SEQ ID NO: 1892931 - DNA, 15 bp, Homo sapiens
cattttggcctctaa

SEQ ID NO: 1892932 - DNA, 15 bp, Homo sapiens
attttggcctctaag

SEQ ID NO: 1892933 - DNA, 15 bp, Homo sapiens
ttttggcctctaaga

SEQ ID NO: 1892934 - DNA, 15 bp, Homo sapiens
tttggcctctaagaa

SEQ ID NO: 1892935 - DNA, 15 bp, Homo sapiens
ttggcctctaagaaa

SEQ ID NO: 1892936 - DNA, 15 bp, Homo sapiens
tggcctctaagaaac

SEQ ID NO: 1892937 - DNA, 15 bp, Homo sapiens
ggcctctaagaaact

SEQ ID NO: 1892938 - DNA, 15 bp, Homo sapiens
gcctctaagaaactt

SEQ ID NO: 1892939 - DNA, 15 bp, Homo sapiens
cctctaagaaacttc

SEQ ID NO: 1892940 - DNA, 15 bp, Homo sapiens
ctctaagaaacttcg

SEQ ID NO: 1892941 - DNA, 15 bp, Homo sapiens
tctaagaaacttcgt

SEQ ID NO: 1892942 - DNA, 15 bp, Homo sapiens
ctaagaaacttcgtg

SEQ ID NO: 1892943 - DNA, 15 bp, Homo sapiens
taagaaacttcgtgt

SEQ ID NO: 1892944 - DNA, 15 bp, Homo sapiens
aagaaacttcgtgtg

SEQ ID NO: 1892945 - DNA, 15 bp, Homo sapiens
agaaacttcgtgtgg

SEQ ID NO: 1892946 - DNA, 15 bp, Homo sapiens
gaaacttcgtgtggt

SEQ ID NO: 1892947 - DNA, 15 bp, Homo sapiens
aaacttcgtgtggtt

SEQ ID NO: 1892948 - DNA, 15 bp, Homo sapiens
aacttcgtgtggttc

SEQ ID NO: 1892949 - DNA, 15 bp, Homo sapiens
acttcgtgtggttca

SEQ ID NO: 1892950 - DNA, 15 bp, Homo sapiens
cttcgtgtggttcac

SEQ ID NO: 1892951 - DNA, 15 bp, Homo sapiens
ttcgtgtggttcacc

SEQ ID NO: 1892952 - DNA, 15 bp, Homo sapiens
tcgtgtggttcacct

SEQ ID NO: 1892953 - DNA, 15 bp, Homo sapiens
cgtgtggttcacctc

SEQ ID NO: 1892954 - DNA, 15 bp, Homo sapiens
gtgtggttcacctca

SEQ ID NO: 1892955 - DNA, 15 bp, Homo sapiens
tgtggttcacctcag

SEQ ID NO: 1892956 - DNA, 15 bp, Homo sapiens
gtggttcacctcagg

SEQ ID NO: 1892957 - DNA, 15 bp, Homo sapiens
tggttcacctcaggt

SEQ ID NO: 1892958 - DNA, 15 bp, Homo sapiens
ggttcacctcaggta

SEQ ID NO: 1892959 - DNA, 15 bp, Homo sapiens
gttcacctcaggtat

SEQ ID NO: 1892960 - DNA, 15 bp, Homo sapiens
ttcacctcaggtatg

SEQ ID NO: 1892961 - DNA, 15 bp, Homo sapiens
tcacctcaggtatga

SEQ ID NO: 1892962 - DNA, 15 bp, Homo sapiens
cacctcaggtatgac

SEQ ID NO: 1892963 - DNA, 15 bp, Homo sapiens
acctcaggtatgaca

SEQ ID NO: 1892964 - DNA, 15 bp, Homo sapiens
cctcaggtatgacaa

SEQ ID NO: 1892965 - DNA, 15 bp, Homo sapiens
ctcaggtatgacaag

SEQ ID NO: 1892966 - DNA, 15 bp, Homo sapiens
tcaggtatgacaagc

SEQ ID NO: 1892967 - DNA, 15 bp, Homo sapiens
caggtatgacaagcc

SEQ ID NO: 1892968 - DNA, 15 bp, Homo sapiens
aggtatgacaagcca

SEQ ID NO: 1892969 - DNA, 15 bp, Homo sapiens
ggtatgacaagccat

SEQ ID NO: 1892970 - DNA, 15 bp, Homo sapiens
gtatgacaagccata

SEQ ID NO: 1892971 - DNA, 15 bp, Homo sapiens
tatgacaagccataa

SEQ ID NO: 1892972 - DNA, 15 bp, Homo sapiens
atgacaagccataac

SEQ ID NO: 1892973 - DNA, 15 bp, Homo sapiens
tgacaagccataact

SEQ ID NO: 1892974 - DNA, 15 bp, Homo sapiens
gacaagccataactt

SEQ ID NO: 1892975 - DNA, 15 bp, Homo sapiens
acaagccataacttc

SEQ ID NO: 1892976 - DNA, 15 bp, Homo sapiens
caagccataacttcc

SEQ ID NO: 1892977 - DNA, 15 bp, Homo sapiens
aagccataacttcct

SEQ ID NO: 1892978 - DNA, 15 bp, Homo sapiens
agccataacttcctt

SEQ ID NO: 1892979 - DNA, 15 bp, Homo sapiens
gccataacttccttg

SEQ ID NO: 1892980 - DNA, 15 bp, Homo sapiens
ccataacttccttgg

SEQ ID NO: 1892981 - DNA, 15 bp, Homo sapiens
cataacttccttggc

SEQ ID NO: 1892982 - DNA, 15 bp, Homo sapiens
ataacttccttggca

SEQ ID NO: 1892983 - DNA, 15 bp, Homo sapiens
taacttccttggcaa

SEQ ID NO: 1892984 - DNA, 15 bp, Homo sapiens
aacttccttggcaaa

SEQ ID NO: 1892985 - DNA, 15 bp, Homo sapiens
acttccttggcaaaa

SEQ ID NO: 1892986 - DNA, 15 bp, Homo sapiens
cttccttggcaaaat

SEQ ID NO: 1892987 - DNA, 15 bp, Homo sapiens
ttccttggcaaaatg

SEQ ID NO: 1892988 - DNA, 15 bp, Homo sapiens
tccttggcaaaatgt

SEQ ID NO: 1892989 - DNA, 15 bp, Homo sapiens
ccttggcaaaatgtc

SEQ ID NO: 1892990 - DNA, 15 bp, Homo sapiens
cttggcaaaatgtct

SEQ ID NO: 1892991 - DNA, 15 bp, Homo sapiens
ttggcaaaatgtctg

SEQ ID NO: 1892992 - DNA, 15 bp, Homo sapiens
tggcaaaatgtctga

SEQ ID NO: 1892993 - DNA, 15 bp, Homo sapiens
ggcaaaatgtctgat

SEQ ID NO: 1892994 - DNA, 15 bp, Homo sapiens
gcaaaatgtctgatg

SEQ ID NO: 1892995 - DNA, 15 bp, Homo sapiens
caaaatgtctgatga

SEQ ID NO: 1892996 - DNA, 15 bp, Homo sapiens
aaaatgtctgatgaa

SEQ ID NO: 1892997 - DNA, 15 bp, Homo sapiens
aaatgtctgatgaag

SEQ ID NO: 1892998 - DNA, 15 bp, Homo sapiens
aatgtctgatgaaga

SEQ ID NO: 1892999 - DNA, 15 bp, Homo sapiens
atgtctgatgaagac

SEQ ID NO: 1893000 - DNA, 15 bp, Homo sapiens
tgtctgatgaagact

SEQ ID NO: 1893001 - DNA, 15 bp, Homo sapiens
gtctgatgaagactt

SEQ ID NO: 1893002 - DNA, 15 bp, Homo sapiens
tctgatgaagactta

SEQ ID NO: 1893003 - DNA, 15 bp, Homo sapiens
ctgatgaagacttag

SEQ ID NO: 1893004 - DNA, 15 bp, Homo sapiens
tgatgaagacttagt

SEQ ID NO: 1893005 - DNA, 15 bp, Homo sapiens
gatgaagacttagtg

SEQ ID NO: 1893006 - DNA, 15 bp, Homo sapiens
atgaagacttagtgg

SEQ ID NO: 1893007 - DNA, 15 bp, Homo sapiens
tgaagacttagtggt

SEQ ID NO: 1893008 - DNA, 15 bp, Homo sapiens
gaagacttagtggtg

SEQ ID NO: 1893009 - DNA, 15 bp, Homo sapiens
aagacttagtggtga

SEQ ID NO: 1893010 - DNA, 15 bp, Homo sapiens
agacttagtggtgaa

SEQ ID NO: 1893011 - DNA, 15 bp, Homo sapiens
gacttagtggtgaaa

SEQ ID NO: 1893012 - DNA, 15 bp, Homo sapiens
acttagtggtgaaaa

SEQ ID NO: 1893013 - DNA, 15 bp, Homo sapiens
cttagtggtgaaaaa

SEQ ID NO: 1893014 - DNA, 15 bp, Homo sapiens
ttagtggtgaaaaat

SEQ ID NO: 1893015 - DNA, 15 bp, Homo sapiens
tagtggtgaaaaatg

SEQ ID NO: 1893016 - DNA, 15 bp, Homo sapiens
agtggtgaaaaatga

SEQ ID NO: 1893017 - DNA, 15 bp, Homo sapiens
gtggtgaaaaatgac

SEQ ID NO: 1893018 - DNA, 15 bp, Homo sapiens
tggtgaaaaatgaca

SEQ ID NO: 1893019 - DNA, 15 bp, Homo sapiens
ggtgaaaaatgacaa

SEQ ID NO: 1893020 - DNA, 15 bp, Homo sapiens
gtgaaaaatgacaaa

SEQ ID NO: 1893021 - DNA, 15 bp, Homo sapiens
tgaaaaatgacaaag

SEQ ID NO: 1893022 - DNA, 15 bp, Homo sapiens
gaaaaatgacaaagg

SEQ ID NO: 1893023 - DNA, 15 bp, Homo sapiens
aaaaatgacaaagga

SEQ ID NO: 1893024 - DNA, 15 bp, Homo sapiens
aaaatgacaaaggaa

SEQ ID NO: 1893025 - DNA, 15 bp, Homo sapiens
aaatgacaaaggaag

SEQ ID NO: 1893026 - DNA, 15 bp, Homo sapiens
aatgacaaaggaagg

SEQ ID NO: 1893027 - DNA, 15 bp, Homo sapiens
atgacaaaggaaggc

SEQ ID NO: 1893028 - DNA, 15 bp, Homo sapiens
tgacaaaggaaggct

SEQ ID NO: 1893029 - DNA, 15 bp, Homo sapiens
gacaaaggaaggctg

SEQ ID NO: 1893030 - DNA, 15 bp, Homo sapiens
acaaaggaaggctgt

SEQ ID NO: 1893031 - DNA, 15 bp, Homo sapiens
caaaggaaggctgtt

SEQ ID NO: 1893032 - DNA, 15 bp, Homo sapiens
aaaggaaggctgttt

SEQ ID NO: 1893033 - DNA, 15 bp, Homo sapiens
aaggaaggctgtttg

SEQ ID NO: 1893034 - DNA, 15 bp, Homo sapiens
aggaaggctgtttga

SEQ ID NO: 1893035 - DNA, 15 bp, Homo sapiens
ggaaggctgtttgac

SEQ ID NO: 1893036 - DNA, 15 bp, Homo sapiens
gaaggctgtttgact

SEQ ID NO: 1893037 - DNA, 15 bp, Homo sapiens
aaggctgtttgactt

SEQ ID NO: 1893038 - DNA, 15 bp, Homo sapiens
aggctgtttgacttg

SEQ ID NO: 1893039 - DNA, 15 bp, Homo sapiens
ggctgtttgacttgt

SEQ ID NO: 1893040 - DNA, 15 bp, Homo sapiens
gctgtttgacttgtg

SEQ ID NO: 1893041 - DNA, 15 bp, Homo sapiens
ctgtttgacttgtgt

SEQ ID NO: 1893042 - DNA, 15 bp, Homo sapiens
tgtttgacttgtgtt

SEQ ID NO: 1893043 - DNA, 15 bp, Homo sapiens
gtttgacttgtgttg

SEQ ID NO: 1893044 - DNA, 15 bp, Homo sapiens
tttgacttgtgttgt

SEQ ID NO: 1893045 - DNA, 15 bp, Homo sapiens
ttgacttgtgttgta

SEQ ID NO: 1893046 - DNA, 15 bp, Homo sapiens
tgacttgtgttgtag

SEQ ID NO: 1893047 - DNA, 15 bp, Homo sapiens
gacttgtgttgtagc

SEQ ID NO: 1893048 - DNA, 15 bp, Homo sapiens
acttgtgttgtagca

SEQ ID NO: 1893049 - DNA, 15 bp, Homo sapiens
cttgtgttgtagcac

SEQ ID NO: 1893050 - DNA, 15 bp, Homo sapiens
ttgtgttgtagcact

SEQ ID NO: 1893051 - DNA, 15 bp, Homo sapiens
tgtgttgtagcacta

SEQ ID NO: 1893052 - DNA, 15 bp, Homo sapiens
gtgttgtagcactat

SEQ ID NO: 1893053 - DNA, 15 bp, Homo sapiens
tgttgtagcactata

SEQ ID NO: 1893054 - DNA, 15 bp, Homo sapiens
gttgtagcactatag

SEQ ID NO: 1893055 - DNA, 15 bp, Homo sapiens
ttgtagcactatagc

SEQ ID NO: 1893056 - DNA, 15 bp, Homo sapiens
tgtagcactatagca

SEQ ID NO: 1893057 - DNA, 15 bp, Homo sapiens
gtagcactatagcaa

SEQ ID NO: 1893058 - DNA, 15 bp, Homo sapiens
tagcactatagcaaa

SEQ ID NO: 1893059 - DNA, 15 bp, Homo sapiens
agcactatagcaaaa

SEQ ID NO: 1893060 - DNA, 15 bp, Homo sapiens
gcactatagcaaaag

SEQ ID NO: 1893061 - DNA, 15 bp, Homo sapiens
cactatagcaaaagg

SEQ ID NO: 1893062 - DNA, 15 bp, Homo sapiens
actatagcaaaaggg

SEQ ID NO: 1893063 - DNA, 15 bp, Homo sapiens
ctatagcaaaagggt

SEQ ID NO: 1893064 - DNA, 15 bp, Homo sapiens
tatagcaaaagggtg

SEQ ID NO: 1893065 - DNA, 15 bp, Homo sapiens
atagcaaaagggtgg

SEQ ID NO: 1893066 - DNA, 15 bp, Homo sapiens
tagcaaaagggtggg

SEQ ID NO: 1893067 - DNA, 15 bp, Homo sapiens
agcaaaagggtgggg

SEQ ID NO: 1893068 - DNA, 15 bp, Homo sapiens
gcaaaagggtggggg

SEQ ID NO: 1893069 - DNA, 15 bp, Homo sapiens
caaaagggtgggggg

SEQ ID NO: 1893070 - DNA, 15 bp, Homo sapiens
aaaagggtggggggg

SEQ ID NO: 1893071 - DNA, 15 bp, Homo sapiens
aaagggtgggggggt

SEQ ID NO: 1893072 - DNA, 15 bp, Homo sapiens
aagggtgggggggta

SEQ ID NO: 1893073 - DNA, 15 bp, Homo sapiens
agggtgggggggtat

SEQ ID NO: 1893074 - DNA, 15 bp, Homo sapiens
gggtgggggggtatg

SEQ ID NO: 1893075 - DNA, 15 bp, Homo sapiens
ggtgggggggtatga

SEQ ID NO: 1893076 - DNA, 15 bp, Homo sapiens
gtgggggggtatgag

SEQ ID NO: 1893077 - DNA, 15 bp, Homo sapiens
tgggggggtatgagt

SEQ ID NO: 1893078 - DNA, 15 bp, Homo sapiens
gggggggtatgagtg

SEQ ID NO: 1893079 - DNA, 15 bp, Homo sapiens
ggggggtatgagtga

SEQ ID NO: 1893080 - DNA, 15 bp, Homo sapiens
gggggtatgagtgag

SEQ ID NO: 1893081 - DNA, 15 bp, Homo sapiens
ggggtatgagtgaga

SEQ ID NO: 1893082 - DNA, 15 bp, Homo sapiens
gggtatgagtgagag

SEQ ID NO: 1893083 - DNA, 15 bp, Homo sapiens
ggtatgagtgagaga

SEQ ID NO: 1893084 - DNA, 15 bp, Homo sapiens
gtatgagtgagagag

SEQ ID NO: 1893085 - DNA, 15 bp, Homo sapiens
tatgagtgagagaga

SEQ ID NO: 1893086 - DNA, 15 bp, Homo sapiens
atgagtgagagagag

SEQ ID NO: 1893087 - DNA, 15 bp, Homo sapiens
tgagtgagagagaga

SEQ ID NO: 1893088 - DNA, 15 bp, Homo sapiens
gagtgagagagagag

SEQ ID NO: 1893089 - DNA, 15 bp, Homo sapiens
agtgagagagagaga

SEQ ID NO: 1893090 - DNA, 15 bp, Homo sapiens
gtgagagagagagag

SEQ ID NO: 1893091 - DNA, 15 bp, Homo sapiens
agagagagagagatg

SEQ ID NO: 1893092 - DNA, 15 bp, Homo sapiens
gagagagagagatgg

SEQ ID NO: 1893093 - DNA, 15 bp, Homo sapiens
agagagagagatggt

SEQ ID NO: 1893094 - DNA, 15 bp, Homo sapiens
gagagagagatggtt

SEQ ID NO: 1893095 - DNA, 15 bp, Homo sapiens
agagagagatggttt

SEQ ID NO: 1893096 - DNA, 15 bp, Homo sapiens
gagagagatggttta

SEQ ID NO: 1893097 - DNA, 15 bp, Homo sapiens
agagagatggtttat

SEQ ID NO: 1893098 - DNA, 15 bp, Homo sapiens
gagagatggtttatg

SEQ ID NO: 1893099 - DNA, 15 bp, Homo sapiens
agagatggtttatgg

SEQ ID NO: 1893100 - DNA, 15 bp, Homo sapiens
gagatggtttatgga

SEQ ID NO: 1893101 - DNA, 15 bp, Homo sapiens
agatggtttatggag

SEQ ID NO: 1893102 - DNA, 15 bp, Homo sapiens
gatggtttatggagt

SEQ ID NO: 1893103 - DNA, 15 bp, Homo sapiens
atggtttatggagtt

SEQ ID NO: 1893104 - DNA, 15 bp, Homo sapiens
tggtttatggagtta

SEQ ID NO: 1893105 - DNA, 15 bp, Homo sapiens
ggtttatggagttaa

SEQ ID NO: 1893106 - DNA, 15 bp, Homo sapiens
gtttatggagttaac

SEQ ID NO: 1893107 - DNA, 15 bp, Homo sapiens
tttatggagttaact

SEQ ID NO: 1893108 - DNA, 15 bp, Homo sapiens
ttatggagttaacta

SEQ ID NO: 1893109 - DNA, 15 bp, Homo sapiens
tatggagttaactac

SEQ ID NO: 1893110 - DNA, 15 bp, Homo sapiens
atggagttaactact

SEQ ID NO: 1893111 - DNA, 15 bp, Homo sapiens
tggagttaactactt

SEQ ID NO: 1893112 - DNA, 15 bp, Homo sapiens
ggagttaactacttt

SEQ ID NO: 1893113 - DNA, 15 bp, Homo sapiens
gagttaactacttta

SEQ ID NO: 1893114 - DNA, 15 bp, Homo sapiens
agttaactactttat

SEQ ID NO: 1893115 - DNA, 15 bp, Homo sapiens
gttaactactttatt

SEQ ID NO: 1893116 - DNA, 15 bp, Homo sapiens
ttaactactttattt

SEQ ID NO: 1893117 - DNA, 15 bp, Homo sapiens
taactactttatttt

SEQ ID NO: 1893118 - DNA, 15 bp, Homo sapiens
aactactttattttg

SEQ ID NO: 1893119 - DNA, 15 bp, Homo sapiens
actactttattttgt

SEQ ID NO: 1893120 - DNA, 15 bp, Homo sapiens
ctactttattttgtt

SEQ ID NO: 1893121 - DNA, 15 bp, Homo sapiens
tactttattttgttg

SEQ ID NO: 1893122 - DNA, 15 bp, Homo sapiens
actttattttgttga

SEQ ID NO: 1893123 - DNA, 15 bp, Homo sapiens
ctttattttgttgat

SEQ ID NO: 1893124 - DNA, 15 bp, Homo sapiens
tttattttgttgata

SEQ ID NO: 1893125 - DNA, 15 bp, Homo sapiens
ttattttgttgatat

SEQ ID NO: 1893126 - DNA, 15 bp, Homo sapiens
tattttgttgatatt

SEQ ID NO: 1893127 - DNA, 15 bp, Homo sapiens
attttgttgatattc

SEQ ID NO: 1893128 - DNA, 15 bp, Homo sapiens
ttttgttgatattca

SEQ ID NO: 1893129 - DNA, 15 bp, Homo sapiens
tttgttgatattcag

SEQ ID NO: 1893130 - DNA, 15 bp, Homo sapiens
ttgttgatattcaga

SEQ ID NO: 1893131 - DNA, 15 bp, Homo sapiens
tgttgatattcagag

SEQ ID NO: 1893132 - DNA, 15 bp, Homo sapiens
gttgatattcagagt

SEQ ID NO: 1893133 - DNA, 15 bp, Homo sapiens
ttgatattcagagtg

SEQ ID NO: 1893134 - DNA, 15 bp, Homo sapiens
tgatattcagagtga

SEQ ID NO: 1893135 - DNA, 15 bp, Homo sapiens
gatattcagagtgac

SEQ ID NO: 1893136 - DNA, 15 bp, Homo sapiens
atattcagagtgaca

SEQ ID NO: 1893137 - DNA, 15 bp, Homo sapiens
tattcagagtgacag

SEQ ID NO: 1893138 - DNA, 15 bp, Homo sapiens
attcagagtgacaga

SEQ ID NO: 1893139 - DNA, 15 bp, Homo sapiens
ttcagagtgacagag

SEQ ID NO: 1893140 - DNA, 15 bp, Homo sapiens
tcagagtgacagaga

SEQ ID NO: 1893141 - DNA, 15 bp, Homo sapiens
cagagtgacagagat

SEQ ID NO: 1893142 - DNA, 15 bp, Homo sapiens
agagtgacagagata

SEQ ID NO: 1893143 - DNA, 15 bp, Homo sapiens
gagtgacagagataa

SEQ ID NO: 1893144 - DNA, 15 bp, Homo sapiens
agtgacagagataag

SEQ ID NO: 1893145 - DNA, 15 bp, Homo sapiens
gtgacagagataagt

SEQ ID NO: 1893146 - DNA, 15 bp, Homo sapiens
tgacagagataagtg

SEQ ID NO: 1893147 - DNA, 15 bp, Homo sapiens
gacagagataagtga

SEQ ID NO: 1893148 - DNA, 15 bp, Homo sapiens
acagagataagtgat

SEQ ID NO: 1893149 - DNA, 15 bp, Homo sapiens
cagagataagtgatc

SEQ ID NO: 1893150 - DNA, 15 bp, Homo sapiens
agagataagtgatct

SEQ ID NO: 1893151 - DNA, 15 bp, Homo sapiens
gagataagtgatcta

SEQ ID NO: 1893152 - DNA, 15 bp, Homo sapiens
agataagtgatctaa

SEQ ID NO: 1893153 - DNA, 15 bp, Homo sapiens
gataagtgatctaat

SEQ ID NO: 1893154 - DNA, 15 bp, Homo sapiens
ataagtgatctaata

SEQ ID NO: 1893155 - DNA, 15 bp, Homo sapiens
taagtgatctaatat

SEQ ID NO: 1893156 - DNA, 15 bp, Homo sapiens
aagtgatctaatatt

SEQ ID NO: 1893157 - DNA, 15 bp, Homo sapiens
agtgatctaatattc

SEQ ID NO: 1893158 - DNA, 15 bp, Homo sapiens
gtgatctaatattcc

SEQ ID NO: 1893159 - DNA, 15 bp, Homo sapiens
tgatctaatattcct

SEQ ID NO: 1893160 - DNA, 15 bp, Homo sapiens
gatctaatattcctg

SEQ ID NO: 1893161 - DNA, 15 bp, Homo sapiens
atctaatattcctgg

SEQ ID NO: 1893162 - DNA, 15 bp, Homo sapiens
tctaatattcctggg

SEQ ID NO: 1893163 - DNA, 15 bp, Homo sapiens
ctaatattcctggga

SEQ ID NO: 1893164 - DNA, 15 bp, Homo sapiens
taatattcctgggat

SEQ ID NO: 1893165 - DNA, 15 bp, Homo sapiens
aatattcctgggatt

SEQ ID NO: 1893166 - DNA, 15 bp, Homo sapiens
atattcctgggattt

SEQ ID NO: 1893167 - DNA, 15 bp, Homo sapiens
tattcctgggatttt

SEQ ID NO: 1893168 - DNA, 15 bp, Homo sapiens
attcctgggatttta

SEQ ID NO: 1893169 - DNA, 15 bp, Homo sapiens
ttcctgggattttac

SEQ ID NO: 1893170 - DNA, 15 bp, Homo sapiens
tcctgggattttact

SEQ ID NO: 1893171 - DNA, 15 bp, Homo sapiens
cctgggattttactc

SEQ ID NO: 1893172 - DNA, 15 bp, Homo sapiens
ctgggattttactca

SEQ ID NO: 1893173 - DNA, 15 bp, Homo sapiens
tgggattttactcaa

SEQ ID NO: 1893174 - DNA, 15 bp, Homo sapiens
gggattttactcaag

SEQ ID NO: 1893175 - DNA, 15 bp, Homo sapiens
ggattttactcaagt

SEQ ID NO: 1893176 - DNA, 15 bp, Homo sapiens
gattttactcaagtc

SEQ ID NO: 1893177 - DNA, 15 bp, Homo sapiens
attttactcaagtct

SEQ ID NO: 1893178 - DNA, 15 bp, Homo sapiens
ttttactcaagtcta

SEQ ID NO: 1893179 - DNA, 15 bp, Homo sapiens
tttactcaagtctag

SEQ ID NO: 1893180 - DNA, 15 bp, Homo sapiens
ttactcaagtctagg

SEQ ID NO: 1893181 - DNA, 15 bp, Homo sapiens
tactcaagtctaggt

SEQ ID NO: 1893182 - DNA, 15 bp, Homo sapiens
actcaagtctaggtc

SEQ ID NO: 1893183 - DNA, 15 bp, Homo sapiens
ctcaagtctaggtca

SEQ ID NO: 1893184 - DNA, 15 bp, Homo sapiens
tcaagtctaggtcat

SEQ ID NO: 1893185 - DNA, 15 bp, Homo sapiens
gtgaaatgttgttcc

SEQ ID NO: 1893186 - DNA, 15 bp, Homo sapiens
tgaaatgttgttcca

SEQ ID NO: 1893187 - DNA, 15 bp, Homo sapiens
gaaatgttgttccat

SEQ ID NO: 1893188 - DNA, 15 bp, Homo sapiens
aaatgttgttccatg

SEQ ID NO: 1893189 - DNA, 15 bp, Homo sapiens
aatgttgttccatgc

SEQ ID NO: 1893190 - DNA, 15 bp, Homo sapiens
atgttgttccatgct

SEQ ID NO: 1893191 - DNA, 15 bp, Homo sapiens
tgttgttccatgctt

SEQ ID NO: 1893192 - DNA, 15 bp, Homo sapiens
gttgttccatgcttt

SEQ ID NO: 1893193 - DNA, 15 bp, Homo sapiens
ttgttccatgctttt

SEQ ID NO: 1893194 - DNA, 15 bp, Homo sapiens
tgttccatgcttttc

SEQ ID NO: 1893195 - DNA, 15 bp, Homo sapiens
gttccatgcttttct

SEQ ID NO: 1893196 - DNA, 15 bp, Homo sapiens
ttccatgcttttcta

SEQ ID NO: 1893197 - DNA, 15 bp, Homo sapiens
tccatgcttttctaa

SEQ ID NO: 1893198 - DNA, 15 bp, Homo sapiens
ccatgcttttctaat

SEQ ID NO: 1893199 - DNA, 15 bp, Homo sapiens
catgcttttctaatt

SEQ ID NO: 1893200 - DNA, 15 bp, Homo sapiens
atgcttttctaattt

SEQ ID NO: 1893201 - DNA, 15 bp, Homo sapiens
tgcttttctaattta

SEQ ID NO: 1893202 - DNA, 15 bp, Homo sapiens
gcttttctaatttaa

SEQ ID NO: 1893203 - DNA, 15 bp, Homo sapiens
cttttctaatttaaa

SEQ ID NO: 1893204 - DNA, 15 bp, Homo sapiens
ttttctaatttaaat

SEQ ID NO: 1893205 - DNA, 15 bp, Homo sapiens
tttctaatttaaatg

SEQ ID NO: 1893206 - DNA, 15 bp, Homo sapiens
ttctaatttaaatgt

SEQ ID NO: 1893207 - DNA, 15 bp, Homo sapiens
tctaatttaaatgtt

SEQ ID NO: 1893208 - DNA, 15 bp, Homo sapiens
ctaatttaaatgttg

SEQ ID NO: 1893209 - DNA, 15 bp, Homo sapiens
taatttaaatgttgc

SEQ ID NO: 1893210 - DNA, 15 bp, Homo sapiens
aatttaaatgttgca

SEQ ID NO: 1893211 - DNA, 15 bp, Homo sapiens
atttaaatgttgcac

SEQ ID NO: 1893212 - DNA, 15 bp, Homo sapiens
tttaaatgttgcaca

SEQ ID NO: 1893213 - DNA, 15 bp, Homo sapiens
ttaaatgttgcacat

SEQ ID NO: 1893214 - DNA, 15 bp, Homo sapiens
taaatgttgcacatg

SEQ ID NO: 1893215 - DNA, 15 bp, Homo sapiens
aaatgttgcacatgt

SEQ ID NO: 1893216 - DNA, 15 bp, Homo sapiens
aatgttgcacatgtt

SEQ ID NO: 1893217 - DNA, 15 bp, Homo sapiens
atgttgcacatgttg

SEQ ID NO: 1893218 - DNA, 15 bp, Homo sapiens
tgttgcacatgttga

SEQ ID NO: 1893219 - DNA, 15 bp, Homo sapiens
gttgcacatgttgag

SEQ ID NO: 1893220 - DNA, 15 bp, Homo sapiens
ttgcacatgttgaga

SEQ ID NO: 1893221 - DNA, 15 bp, Homo sapiens
tgcacatgttgagaa

SEQ ID NO: 1893222 - DNA, 15 bp, Homo sapiens
gcacatgttgagaac

SEQ ID NO: 1893223 - DNA, 15 bp, Homo sapiens
cacatgttgagaact

SEQ ID NO: 1893224 - DNA, 15 bp, Homo sapiens
acatgttgagaactg

SEQ ID NO: 1893225 - DNA, 15 bp, Homo sapiens
catgttgagaactga

SEQ ID NO: 1893226 - DNA, 15 bp, Homo sapiens
atgttgagaactgat

SEQ ID NO: 1893227 - DNA, 15 bp, Homo sapiens
tgttgagaactgatc

SEQ ID NO: 1893228 - DNA, 15 bp, Homo sapiens
gttgagaactgatct

SEQ ID NO: 1893229 - DNA, 15 bp, Homo sapiens
ttgagaactgatctt

SEQ ID NO: 1893230 - DNA, 15 bp, Homo sapiens
tgagaactgatcttg

SEQ ID NO: 1893231 - DNA, 15 bp, Homo sapiens
gagaactgatcttgc

SEQ ID NO: 1893232 - DNA, 15 bp, Homo sapiens
agaactgatcttgcc

SEQ ID NO: 1893233 - DNA, 15 bp, Homo sapiens
gaactgatcttgcca

SEQ ID NO: 1893234 - DNA, 15 bp, Homo sapiens
aactgatcttgccag

SEQ ID NO: 1893235 - DNA, 15 bp, Homo sapiens
actgatcttgccagc

SEQ ID NO: 1893236 - DNA, 15 bp, Homo sapiens
ctgatcttgccagcc

SEQ ID NO: 1893237 - DNA, 15 bp, Homo sapiens
tgatcttgccagcca

SEQ ID NO: 1893238 - DNA, 15 bp, Homo sapiens
gatcttgccagccat

SEQ ID NO: 1893239 - DNA, 15 bp, Homo sapiens
atcttgccagccatt

SEQ ID NO: 1893240 - DNA, 15 bp, Homo sapiens
tcttgccagccattt

SEQ ID NO: 1893241 - DNA, 15 bp, Homo sapiens
cttgccagccatttt

SEQ ID NO: 1893242 - DNA, 15 bp, Homo sapiens
ttgccagccatttta

SEQ ID NO: 1893243 - DNA, 15 bp, Homo sapiens
tgccagccattttaa

SEQ ID NO: 1893244 - DNA, 15 bp, Homo sapiens
gccagccattttaag

SEQ ID NO: 1893245 - DNA, 15 bp, Homo sapiens
ccagccattttaagc

SEQ ID NO: 1893246 - DNA, 15 bp, Homo sapiens
cagccattttaagcc

SEQ ID NO: 1893247 - DNA, 15 bp, Homo sapiens
agccattttaagcct

SEQ ID NO: 1893248 - DNA, 15 bp, Homo sapiens
gccattttaagcctg

SEQ ID NO: 1893249 - DNA, 15 bp, Homo sapiens
ccattttaagcctgg

SEQ ID NO: 1893250 - DNA, 15 bp, Homo sapiens
cattttaagcctggc

SEQ ID NO: 1893251 - DNA, 15 bp, Homo sapiens
attttaagcctggcc

SEQ ID NO: 1893252 - DNA, 15 bp, Homo sapiens
ttttaagcctggcca

SEQ ID NO: 1893253 - DNA, 15 bp, Homo sapiens
tttaagcctggccaa

SEQ ID NO: 1893254 - DNA, 15 bp, Homo sapiens
ttaagcctggccaaa

SEQ ID NO: 1893255 - DNA, 15 bp, Homo sapiens
taagcctggccaaaa

SEQ ID NO: 1893256 - DNA, 15 bp, Homo sapiens
aagcctggccaaaaa

SEQ ID NO: 1893257 - DNA, 15 bp, Homo sapiens
agcctggccaaaaac

SEQ ID NO: 1893258 - DNA, 15 bp, Homo sapiens
gcctggccaaaaaca

SEQ ID NO: 1893259 - DNA, 15 bp, Homo sapiens
cctggccaaaaacat

SEQ ID NO: 1893260 - DNA, 15 bp, Homo sapiens
ctggccaaaaacata

SEQ ID NO: 1893261 - DNA, 15 bp, Homo sapiens
tggccaaaaacataa

SEQ ID NO: 1893262 - DNA, 15 bp, Homo sapiens
ggccaaaaacataac

SEQ ID NO: 1893263 - DNA, 15 bp, Homo sapiens
gccaaaaacataaca

SEQ ID NO: 1893264 - DNA, 15 bp, Homo sapiens
ccaaaaacataacac

SEQ ID NO: 1893265 - DNA, 15 bp, Homo sapiens
caaaaacataacaca

SEQ ID NO: 1893266 - DNA, 15 bp, Homo sapiens
aaaaacataacacat

SEQ ID NO: 1893267 - DNA, 15 bp, Homo sapiens
aaaacataacacatt

SEQ ID NO: 1893268 - DNA, 15 bp, Homo sapiens
aaacataacacattg

SEQ ID NO: 1893269 - DNA, 15 bp, Homo sapiens
aacataacacattgt

SEQ ID NO: 1893270 - DNA, 15 bp, Homo sapiens
acataacacattgtt

SEQ ID NO: 1893271 - DNA, 15 bp, Homo sapiens
cataacacattgttg

SEQ ID NO: 1893272 - DNA, 15 bp, Homo sapiens
ataacacattgttgt

SEQ ID NO: 1893273 - DNA, 15 bp, Homo sapiens
taacacattgttgtt

SEQ ID NO: 1893274 - DNA, 15 bp, Homo sapiens
aacacattgttgtta

SEQ ID NO: 1893275 - DNA, 15 bp, Homo sapiens
acacattgttgttat

SEQ ID NO: 1893276 - DNA, 15 bp, Homo sapiens
cacattgttgttatt

SEQ ID NO: 1893277 - DNA, 15 bp, Homo sapiens
acattgttgttatta

SEQ ID NO: 1893278 - DNA, 15 bp, Homo sapiens
cattgttgttattag

SEQ ID NO: 1893279 - DNA, 15 bp, Homo sapiens
attgttgttattagc

SEQ ID NO: 1893280 - DNA, 15 bp, Homo sapiens
tgttgttattagcct

SEQ ID NO: 1893281 - DNA, 15 bp, Homo sapiens
gttgttattagcctt

SEQ ID NO: 1893282 - DNA, 15 bp, Homo sapiens
ttgttattagccttc

SEQ ID NO: 1893283 - DNA, 15 bp, Homo sapiens
tgttattagccttca

SEQ ID NO: 1893284 - DNA, 15 bp, Homo sapiens
gttattagccttcat

SEQ ID NO: 1893285 - DNA, 15 bp, Homo sapiens
ttattagccttcatc

SEQ ID NO: 1893286 - DNA, 15 bp, Homo sapiens
tattagccttcatca

SEQ ID NO: 1893287 - DNA, 15 bp, Homo sapiens
attagccttcatcat

SEQ ID NO: 1893288 - DNA, 15 bp, Homo sapiens
ttagccttcatcatt

SEQ ID NO: 1893289 - DNA, 15 bp, Homo sapiens
tagccttcatcattt

SEQ ID NO: 1893290 - DNA, 15 bp, Homo sapiens
agccttcatcatttg

SEQ ID NO: 1893291 - DNA, 15 bp, Homo sapiens
gccttcatcatttgg

SEQ ID NO: 1893292 - DNA, 15 bp, Homo sapiens
ccttcatcatttggt

SEQ ID NO: 1893293 - DNA, 15 bp, Homo sapiens
cttcatcatttggtt

SEQ ID NO: 1893294 - DNA, 15 bp, Homo sapiens
ttcatcatttggtta

SEQ ID NO: 1893295 - DNA, 15 bp, Homo sapiens
tcatcatttggttag

SEQ ID NO: 1893296 - DNA, 15 bp, Homo sapiens
catcatttggttagg

SEQ ID NO: 1893297 - DNA, 15 bp, Homo sapiens
atcatttggttaggg

SEQ ID NO: 1893298 - DNA, 15 bp, Homo sapiens
tcatttggttagggc

SEQ ID NO: 1893299 - DNA, 15 bp, Homo sapiens
catttggttagggcc

SEQ ID NO: 1893300 - DNA, 15 bp, Homo sapiens
atttggttagggcca

SEQ ID NO: 1893301 - DNA, 15 bp, Homo sapiens
tttggttagggccaa

SEQ ID NO: 1893302 - DNA, 15 bp, Homo sapiens
ttggttagggccaac

SEQ ID NO: 1893303 - DNA, 15 bp, Homo sapiens
tggttagggccaaca

SEQ ID NO: 1893304 - DNA, 15 bp, Homo sapiens
ggttagggccaacat

SEQ ID NO: 1893305 - DNA, 15 bp, Homo sapiens
gttagggccaacatt

SEQ ID NO: 1893306 - DNA, 15 bp, Homo sapiens
ttagggccaacattt

SEQ ID NO: 1893307 - DNA, 15 bp, Homo sapiens
tagggccaacatttt

SEQ ID NO: 1893308 - DNA, 15 bp, Homo sapiens
agggccaacattttg

SEQ ID NO: 1893309 - DNA, 15 bp, Homo sapiens
gggccaacattttgt

SEQ ID NO: 1893310 - DNA, 15 bp, Homo sapiens
ggccaacattttgtt

SEQ ID NO: 1893311 - DNA, 15 bp, Homo sapiens
gccaacattttgttt

SEQ ID NO: 1893312 - DNA, 15 bp, Homo sapiens
ccaacattttgtttg

SEQ ID NO: 1893313 - DNA, 15 bp, Homo sapiens
caacattttgtttgg

SEQ ID NO: 1893314 - DNA, 15 bp, Homo sapiens
aacattttgtttgga

SEQ ID NO: 1893315 - DNA, 15 bp, Homo sapiens
acattttgtttggaa

SEQ ID NO: 1893316 - DNA, 15 bp, Homo sapiens
cattttgtttggaat

SEQ ID NO: 1893317 - DNA, 15 bp, Homo sapiens
attttgtttggaatt

SEQ ID NO: 1893318 - DNA, 15 bp, Homo sapiens
ttttgtttggaatta

SEQ ID NO: 1893319 - DNA, 15 bp, Homo sapiens
tttgtttggaattat

SEQ ID NO: 1893320 - DNA, 15 bp, Homo sapiens
ttgtttggaattata

SEQ ID NO: 1893321 - DNA, 15 bp, Homo sapiens
tgtttggaattataa

SEQ ID NO: 1893322 - DNA, 15 bp, Homo sapiens
gtttggaattataaa

SEQ ID NO: 1893323 - DNA, 15 bp, Homo sapiens
tttggaattataaag

SEQ ID NO: 1893324 - DNA, 15 bp, Homo sapiens
ttggaattataaagg

SEQ ID NO: 1893325 - DNA, 15 bp, Homo sapiens
tggaattataaagga

SEQ ID NO: 1893326 - DNA, 15 bp, Homo sapiens
ggaattataaaggag

SEQ ID NO: 1893327 - DNA, 15 bp, Homo sapiens
gaattataaaggagt

SEQ ID NO: 1893328 - DNA, 15 bp, Homo sapiens
aattataaaggagtg

SEQ ID NO: 1893329 - DNA, 15 bp, Homo sapiens
attataaaggagtgt

SEQ ID NO: 1893330 - DNA, 15 bp, Homo sapiens
ttataaaggagtgta

SEQ ID NO: 1893331 - DNA, 15 bp, Homo sapiens
tataaaggagtgtaa

SEQ ID NO: 1893332 - DNA, 15 bp, Homo sapiens
ataaaggagtgtaaa

SEQ ID NO: 1893333 - DNA, 15 bp, Homo sapiens
taaaggagtgtaaat

SEQ ID NO: 1893334 - DNA, 15 bp, Homo sapiens
aaaggagtgtaaatc

SEQ ID NO: 1893335 - DNA, 15 bp, Homo sapiens
aaggagtgtaaatct

SEQ ID NO: 1893336 - DNA, 15 bp, Homo sapiens
aggagtgtaaatctc

SEQ ID NO: 1893337 - DNA, 15 bp, Homo sapiens
ggagtgtaaatctct

SEQ ID NO: 1893338 - DNA, 15 bp, Homo sapiens
gagtgtaaatctctt

SEQ ID NO: 1893339 - DNA, 15 bp, Homo sapiens
agtgtaaatctcttt

SEQ ID NO: 1893340 - DNA, 15 bp, Homo sapiens
gtgtaaatctctttt

SEQ ID NO: 1893341 - DNA, 15 bp, Homo sapiens
tgtaaatctctttta

SEQ ID NO: 1893342 - DNA, 15 bp, Homo sapiens
gtaaatctcttttat

SEQ ID NO: 1893343 - DNA, 15 bp, Homo sapiens
taaatctcttttata

SEQ ID NO: 1893344 - DNA, 15 bp, Homo sapiens
aaatctcttttatag

SEQ ID NO: 1893345 - DNA, 15 bp, Homo sapiens
aatctcttttatagt

SEQ ID NO: 1893346 - DNA, 15 bp, Homo sapiens
atctcttttatagtc

SEQ ID NO: 1893347 - DNA, 15 bp, Homo sapiens
tctcttttatagtca

SEQ ID NO: 1893348 - DNA, 15 bp, Homo sapiens
ctcttttatagtcat

SEQ ID NO: 1893349 - DNA, 15 bp, Homo sapiens
tcttttatagtcata

SEQ ID NO: 1893350 - DNA, 15 bp, Homo sapiens
cttttatagtcatag

SEQ ID NO: 1893351 - DNA, 15 bp, Homo sapiens
ttttatagtcatagc

SEQ ID NO: 1893352 - DNA, 15 bp, Homo sapiens
tttatagtcatagcc

SEQ ID NO: 1893353 - DNA, 15 bp, Homo sapiens
ttatagtcatagccg

SEQ ID NO: 1893354 - DNA, 15 bp, Homo sapiens
tatagtcatagccga

SEQ ID NO: 1893355 - DNA, 15 bp, Homo sapiens
atagtcatagccgat

SEQ ID NO: 1893356 - DNA, 15 bp, Homo sapiens
tagtcatagccgatt

SEQ ID NO: 1893357 - DNA, 15 bp, Homo sapiens
agtcatagccgattt

SEQ ID NO: 1893358 - DNA, 15 bp, Homo sapiens
gtcatagccgatttc

SEQ ID NO: 1893359 - DNA, 15 bp, Homo sapiens
tcatagccgatttct

SEQ ID NO: 1893360 - DNA, 15 bp, Homo sapiens
catagccgatttctg

SEQ ID NO: 1893361 - DNA, 15 bp, Homo sapiens
atagccgatttctgc

SEQ ID NO: 1893362 - DNA, 15 bp, Homo sapiens
tagccgatttctgcc

SEQ ID NO: 1893363 - DNA, 15 bp, Homo sapiens
agccgatttctgcca

SEQ ID NO: 1893364 - DNA, 15 bp, Homo sapiens
gccgatttctgccat

SEQ ID NO: 1893365 - DNA, 15 bp, Homo sapiens
ccgatttctgccata

SEQ ID NO: 1893366 - DNA, 15 bp, Homo sapiens
cgatttctgccataa

SEQ ID NO: 1893367 - DNA, 15 bp, Homo sapiens
gatttctgccataag

SEQ ID NO: 1893368 - DNA, 15 bp, Homo sapiens
atttctgccataaga

SEQ ID NO: 1893369 - DNA, 15 bp, Homo sapiens
tttctgccataagat

SEQ ID NO: 1893370 - DNA, 15 bp, Homo sapiens
ttctgccataagata

SEQ ID NO: 1893371 - DNA, 15 bp, Homo sapiens
tctgccataagatag

SEQ ID NO: 1893372 - DNA, 15 bp, Homo sapiens
ctgccataagataga

SEQ ID NO: 1893373 - DNA, 15 bp, Homo sapiens
tgccataagatagat

SEQ ID NO: 1893374 - DNA, 15 bp, Homo sapiens
gccataagatagata

SEQ ID NO: 1893375 - DNA, 15 bp, Homo sapiens
ccataagatagataa

SEQ ID NO: 1893376 - DNA, 15 bp, Homo sapiens
cataagatagataag

SEQ ID NO: 1893377 - DNA, 15 bp, Homo sapiens
ataagatagataaga

SEQ ID NO: 1893378 - DNA, 15 bp, Homo sapiens
taagatagataagat

SEQ ID NO: 1893379 - DNA, 15 bp, Homo sapiens
aagatagataagatg

SEQ ID NO: 1893380 - DNA, 15 bp, Homo sapiens
agatagataagatga

SEQ ID NO: 1893381 - DNA, 15 bp, Homo sapiens
gatagataagatgag

SEQ ID NO: 1893382 - DNA, 15 bp, Homo sapiens
atagataagatgaga

SEQ ID NO: 1893383 - DNA, 15 bp, Homo sapiens
tagataagatgagaa

SEQ ID NO: 1893384 - DNA, 15 bp, Homo sapiens
agataagatgagaag

SEQ ID NO: 1893385 - DNA, 15 bp, Homo sapiens
gataagatgagaagg

SEQ ID NO: 1893386 - DNA, 15 bp, Homo sapiens
ataagatgagaaggc

SEQ ID NO: 1893387 - DNA, 15 bp, Homo sapiens
taagatgagaaggca

SEQ ID NO: 1893388 - DNA, 15 bp, Homo sapiens
aagatgagaaggcag

SEQ ID NO: 1893389 - DNA, 15 bp, Homo sapiens
agatgagaaggcaga

SEQ ID NO: 1893390 - DNA, 15 bp, Homo sapiens
gatgagaaggcagag

SEQ ID NO: 1893391 - DNA, 15 bp, Homo sapiens
atgagaaggcagagt

SEQ ID NO: 1893392 - DNA, 15 bp, Homo sapiens
tgagaaggcagagtt

SEQ ID NO: 1893393 - DNA, 15 bp, Homo sapiens
gagaaggcagagttg

SEQ ID NO: 1893394 - DNA, 15 bp, Homo sapiens
agaaggcagagttgt

SEQ ID NO: 1893395 - DNA, 15 bp, Homo sapiens
gaaggcagagttgtt

SEQ ID NO: 1893396 - DNA, 15 bp, Homo sapiens
aaggcagagttgttt

SEQ ID NO: 1893397 - DNA, 15 bp, Homo sapiens
aggcagagttgtttc

SEQ ID NO: 1893398 - DNA, 15 bp, Homo sapiens
ggcagagttgtttcc

SEQ ID NO: 1893399 - DNA, 15 bp, Homo sapiens
gcagagttgtttcct

SEQ ID NO: 1893400 - DNA, 15 bp, Homo sapiens
cagagttgtttcctt

SEQ ID NO: 1893401 - DNA, 15 bp, Homo sapiens
agagttgtttccttg

SEQ ID NO: 1893402 - DNA, 15 bp, Homo sapiens
gagttgtttccttga

SEQ ID NO: 1893403 - DNA, 15 bp, Homo sapiens
agttgtttccttgat

SEQ ID NO: 1893404 - DNA, 15 bp, Homo sapiens
gttgtttccttgatg

SEQ ID NO: 1893405 - DNA, 15 bp, Homo sapiens
ttgtttccttgatgt

SEQ ID NO: 1893406 - DNA, 15 bp, Homo sapiens
tgtttccttgatgta

SEQ ID NO: 1893407 - DNA, 15 bp, Homo sapiens
gtttccttgatgtat

SEQ ID NO: 1893408 - DNA, 15 bp, Homo sapiens
tttccttgatgtatt

SEQ ID NO: 1893409 - DNA, 15 bp, Homo sapiens
ttccttgatgtattg

SEQ ID NO: 1893410 - DNA, 15 bp, Homo sapiens
tccttgatgtattgc

SEQ ID NO: 1893411 - DNA, 15 bp, Homo sapiens
ccttgatgtattgct

SEQ ID NO: 1893412 - DNA, 15 bp, Homo sapiens
cttgatgtattgctt

SEQ ID NO: 1893413 - DNA, 15 bp, Homo sapiens
ttgatgtattgcttt

SEQ ID NO: 1893414 - DNA, 15 bp, Homo sapiens
tgatgtattgctttg

SEQ ID NO: 1893415 - DNA, 15 bp, Homo sapiens
gatgtattgctttgg

SEQ ID NO: 1893416 - DNA, 15 bp, Homo sapiens
atgtattgctttggt

SEQ ID NO: 1893417 - DNA, 15 bp, Homo sapiens
tgtattgctttggtt

SEQ ID NO: 1893418 - DNA, 15 bp, Homo sapiens
gtattgctttggtta

SEQ ID NO: 1893419 - DNA, 15 bp, Homo sapiens
tattgctttggttag

SEQ ID NO: 1893420 - DNA, 15 bp, Homo sapiens
attgctttggttagc

SEQ ID NO: 1893421 - DNA, 15 bp, Homo sapiens
ttgctttggttagcc

SEQ ID NO: 1893422 - DNA, 15 bp, Homo sapiens
tgctttggttagcct

SEQ ID NO: 1893423 - DNA, 15 bp, Homo sapiens
gctttggttagcctc

SEQ ID NO: 1893424 - DNA, 15 bp, Homo sapiens
ctttggttagcctca

SEQ ID NO: 1893425 - DNA, 15 bp, Homo sapiens
tttggttagcctcat

SEQ ID NO: 1893426 - DNA, 15 bp, Homo sapiens
ttggttagcctcata

SEQ ID NO: 1893427 - DNA, 15 bp, Homo sapiens
tggttagcctcataa

SEQ ID NO: 1893428 - DNA, 15 bp, Homo sapiens
ggttagcctcataag

SEQ ID NO: 1893429 - DNA, 15 bp, Homo sapiens
gttagcctcataagg

SEQ ID NO: 1893430 - DNA, 15 bp, Homo sapiens
ttagcctcataaggc

SEQ ID NO: 1893431 - DNA, 15 bp, Homo sapiens
tagcctcataaggct

SEQ ID NO: 1893432 - DNA, 15 bp, Homo sapiens
agcctcataaggctg

SEQ ID NO: 1893433 - DNA, 15 bp, Homo sapiens
gcctcataaggctga

SEQ ID NO: 1893434 - DNA, 15 bp, Homo sapiens
cctcataaggctgat

SEQ ID NO: 1893435 - DNA, 15 bp, Homo sapiens
ctcataaggctgatt

SEQ ID NO: 1893436 - DNA, 15 bp, Homo sapiens
tcataaggctgatta

SEQ ID NO: 1893437 - DNA, 15 bp, Homo sapiens
cataaggctgattag

SEQ ID NO: 1893438 - DNA, 15 bp, Homo sapiens
ataaggctgattagg

SEQ ID NO: 1893439 - DNA, 15 bp, Homo sapiens
taaggctgattaggc

SEQ ID NO: 1893440 - DNA, 15 bp, Homo sapiens
aaggctgattaggcc

SEQ ID NO: 1893441 - DNA, 15 bp, Homo sapiens
aggctgattaggcca

SEQ ID NO: 1893442 - DNA, 15 bp, Homo sapiens
ggctgattaggccag

SEQ ID NO: 1893443 - DNA, 15 bp, Homo sapiens
gctgattaggccagg

SEQ ID NO: 1893444 - DNA, 15 bp, Homo sapiens
ctgattaggccaggg

SEQ ID NO: 1893445 - DNA, 15 bp, Homo sapiens
tgattaggccaggga

SEQ ID NO: 1893446 - DNA, 15 bp, Homo sapiens
gattaggccagggat

SEQ ID NO: 1893447 - DNA, 15 bp, Homo sapiens
attaggccagggatg

SEQ ID NO: 1893448 - DNA, 15 bp, Homo sapiens
ttaggccagggatgt

SEQ ID NO: 1893449 - DNA, 15 bp, Homo sapiens
taggccagggatgtt

SEQ ID NO: 1893450 - DNA, 15 bp, Homo sapiens
aggccagggatgttc

SEQ ID NO: 1893451 - DNA, 15 bp, Homo sapiens
ggccagggatgttca

SEQ ID NO: 1893452 - DNA, 15 bp, Homo sapiens
gccagggatgttcac

SEQ ID NO: 1893453 - DNA, 15 bp, Homo sapiens
ccagggatgttcact

SEQ ID NO: 1893454 - DNA, 15 bp, Homo sapiens
cagggatgttcactt

SEQ ID NO: 1893455 - DNA, 15 bp, Homo sapiens
agggatgttcacttt

SEQ ID NO: 1893456 - DNA, 15 bp, Homo sapiens
gggatgttcactttg

SEQ ID NO: 1893457 - DNA, 15 bp, Homo sapiens
ggatgttcactttga

SEQ ID NO: 1893458 - DNA, 15 bp, Homo sapiens
gatgttcactttgag

SEQ ID NO: 1893459 - DNA, 15 bp, Homo sapiens
atgttcactttgaga

SEQ ID NO: 1893460 - DNA, 15 bp, Homo sapiens
tgttcactttgagag

SEQ ID NO: 1893461 - DNA, 15 bp, Homo sapiens
gttcactttgagaga

SEQ ID NO: 1893462 - DNA, 15 bp, Homo sapiens
ttcactttgagagac

SEQ ID NO: 1893463 - DNA, 15 bp, Homo sapiens
tcactttgagagact

SEQ ID NO: 1893464 - DNA, 15 bp, Homo sapiens
cactttgagagactt

SEQ ID NO: 1893465 - DNA, 15 bp, Homo sapiens
actttgagagacttc

SEQ ID NO: 1893466 - DNA, 15 bp, Homo sapiens
ctttgagagacttct

SEQ ID NO: 1893467 - DNA, 15 bp, Homo sapiens
tttgagagacttctt

SEQ ID NO: 1893468 - DNA, 15 bp, Homo sapiens
ttgagagacttcttg

SEQ ID NO: 1893469 - DNA, 15 bp, Homo sapiens
tgagagacttcttgg

SEQ ID NO: 1893470 - DNA, 15 bp, Homo sapiens
gagagacttcttggg

SEQ ID NO: 1893471 - DNA, 15 bp, Homo sapiens
agagacttcttggga

SEQ ID NO: 1893472 - DNA, 15 bp, Homo sapiens
gagacttcttgggaa

SEQ ID NO: 1893473 - DNA, 15 bp, Homo sapiens
agacttcttgggaag

SEQ ID NO: 1893474 - DNA, 15 bp, Homo sapiens
gacttcttgggaagt

SEQ ID NO: 1893475 - DNA, 15 bp, Homo sapiens
acttcttgggaagta

SEQ ID NO: 1893476 - DNA, 15 bp, Homo sapiens
cttcttgggaagtaa

SEQ ID NO: 1893477 - DNA, 15 bp, Homo sapiens
ttcttgggaagtaag

SEQ ID NO: 1893478 - DNA, 15 bp, Homo sapiens
tcttgggaagtaaga

SEQ ID NO: 1893479 - DNA, 15 bp, Homo sapiens
cttgggaagtaagat

SEQ ID NO: 1893480 - DNA, 15 bp, Homo sapiens
ttgggaagtaagatt

SEQ ID NO: 1893481 - DNA, 15 bp, Homo sapiens
tgggaagtaagattt

SEQ ID NO: 1893482 - DNA, 15 bp, Homo sapiens
gggaagtaagatttc

SEQ ID NO: 1893483 - DNA, 15 bp, Homo sapiens
ggaagtaagatttca

SEQ ID NO: 1893484 - DNA, 15 bp, Homo sapiens
gaagtaagatttcaa

SEQ ID NO: 1893485 - DNA, 15 bp, Homo sapiens
aagtaagatttcaat

SEQ ID NO: 1893486 - DNA, 15 bp, Homo sapiens
agtaagatttcaatg

SEQ ID NO: 1893487 - DNA, 15 bp, Homo sapiens
gtaagatttcaatgt

SEQ ID NO: 1893488 - DNA, 15 bp, Homo sapiens
taagatttcaatgta

SEQ ID NO: 1893489 - DNA, 15 bp, Homo sapiens
aagatttcaatgtaa

SEQ ID NO: 1893490 - DNA, 15 bp, Homo sapiens
agatttcaatgtaat

SEQ ID NO: 1893491 - DNA, 15 bp, Homo sapiens
gatttcaatgtaatt

SEQ ID NO: 1893492 - DNA, 15 bp, Homo sapiens
atttcaatgtaattc

SEQ ID NO: 1893493 - DNA, 15 bp, Homo sapiens
tttcaatgtaattca

SEQ ID NO: 1893494 - DNA, 15 bp, Homo sapiens
ttcaatgtaattcaa

SEQ ID NO: 1893495 - DNA, 15 bp, Homo sapiens
tcaatgtaattcaac

SEQ ID NO: 1893496 - DNA, 15 bp, Homo sapiens
caatgtaattcaact

SEQ ID NO: 1893497 - DNA, 15 bp, Homo sapiens
aatgtaattcaactt

SEQ ID NO: 1893498 - DNA, 15 bp, Homo sapiens
atgtaattcaactta

SEQ ID NO: 1893499 - DNA, 15 bp, Homo sapiens
tgtaattcaacttaa

SEQ ID NO: 1893500 - DNA, 15 bp, Homo sapiens
gtaattcaacttaaa

SEQ ID NO: 1893501 - DNA, 15 bp, Homo sapiens
taattcaacttaaaa

SEQ ID NO: 1893502 - DNA, 15 bp, Homo sapiens
aattcaacttaaaaa

SEQ ID NO: 1893503 - DNA, 15 bp, Homo sapiens
attcaacttaaaaaa

SEQ ID NO: 1893504 - DNA, 15 bp, Homo sapiens
ttcaacttaaaaaaa

SEQ ID NO: 1893505 - DNA, 15 bp, Homo sapiens
tcaacttaaaaaaat

SEQ ID NO: 1893506 - DNA, 15 bp, Homo sapiens
caacttaaaaaaata

SEQ ID NO: 1893507 - DNA, 15 bp, Homo sapiens
aacttaaaaaaatat

SEQ ID NO: 1893508 - DNA, 15 bp, Homo sapiens
acttaaaaaaatatt

SEQ ID NO: 1893509 - DNA, 15 bp, Homo sapiens
cttaaaaaaatatta

SEQ ID NO: 1893510 - DNA, 15 bp, Homo sapiens
ttaaaaaaatattac

SEQ ID NO: 1893511 - DNA, 15 bp, Homo sapiens
taaaaaaatattacc

SEQ ID NO: 1893512 - DNA, 15 bp, Homo sapiens
aaaaaaatattacct

SEQ ID NO: 1893513 - DNA, 15 bp, Homo sapiens
aaaaaatattacctt

SEQ ID NO: 1893514 - DNA, 15 bp, Homo sapiens
aaaaatattaccttg

SEQ ID NO: 1893515 - DNA, 15 bp, Homo sapiens
aaaatattaccttga

SEQ ID NO: 1893516 - DNA, 15 bp, Homo sapiens
aaatattaccttgat

SEQ ID NO: 1893517 - DNA, 15 bp, Homo sapiens
aatattaccttgatg

SEQ ID NO: 1893518 - DNA, 15 bp, Homo sapiens
atattaccttgatgt

SEQ ID NO: 1893519 - DNA, 15 bp, Homo sapiens
tattaccttgatgtg

SEQ ID NO: 1893520 - DNA, 15 bp, Homo sapiens
attaccttgatgtgc

SEQ ID NO: 1893521 - DNA, 15 bp, Homo sapiens
ttaccttgatgtgca

SEQ ID NO: 1893522 - DNA, 15 bp, Homo sapiens
taccttgatgtgcaa

SEQ ID NO: 1893523 - DNA, 15 bp, Homo sapiens
accttgatgtgcaag

SEQ ID NO: 1893524 - DNA, 15 bp, Homo sapiens
ccttgatgtgcaagg

SEQ ID NO: 1893525 - DNA, 15 bp, Homo sapiens
cttgatgtgcaaggc

SEQ ID NO: 1893526 - DNA, 15 bp, Homo sapiens
ttgatgtgcaaggct

SEQ ID NO: 1893527 - DNA, 15 bp, Homo sapiens
tgatgtgcaaggctc

SEQ ID NO: 1893528 - DNA, 15 bp, Homo sapiens
gatgtgcaaggctct

SEQ ID NO: 1893529 - DNA, 15 bp, Homo sapiens
atgtgcaaggctctg

SEQ ID NO: 1893530 - DNA, 15 bp, Homo sapiens
tgtgcaaggctctgt

SEQ ID NO: 1893531 - DNA, 15 bp, Homo sapiens
gtgcaaggctctgta

SEQ ID NO: 1893532 - DNA, 15 bp, Homo sapiens
tgcaaggctctgtag

SEQ ID NO: 1893533 - DNA, 15 bp, Homo sapiens
gcaaggctctgtagg

SEQ ID NO: 1893534 - DNA, 15 bp, Homo sapiens
caaggctctgtagga

SEQ ID NO: 1893535 - DNA, 15 bp, Homo sapiens
aaggctctgtaggag

SEQ ID NO: 1893536 - DNA, 15 bp, Homo sapiens
aggctctgtaggagg

SEQ ID NO: 1893537 - DNA, 15 bp, Homo sapiens
ggctctgtaggaggt

SEQ ID NO: 1893538 - DNA, 15 bp, Homo sapiens
gctctgtaggaggtg

SEQ ID NO: 1893539 - DNA, 15 bp, Homo sapiens
ctctgtaggaggtgt

SEQ ID NO: 1893540 - DNA, 15 bp, Homo sapiens
tctgtaggaggtgtg

SEQ ID NO: 1893541 - DNA, 15 bp, Homo sapiens
ctgtaggaggtgtgg

SEQ ID NO: 1893542 - DNA, 15 bp, Homo sapiens
tgtaggaggtgtggg

SEQ ID NO: 1893543 - DNA, 15 bp, Homo sapiens
gtaggaggtgtgggg

SEQ ID NO: 1893544 - DNA, 15 bp, Homo sapiens
taggaggtgtgggga

SEQ ID NO: 1893545 - DNA, 15 bp, Homo sapiens
aggaggtgtggggag

SEQ ID NO: 1893546 - DNA, 15 bp, Homo sapiens
ggaggtgtggggagg

SEQ ID NO: 1893547 - DNA, 15 bp, Homo sapiens
gaggtgtggggaggg

SEQ ID NO: 1893548 - DNA, 15 bp, Homo sapiens
aggtgtggggagggg

SEQ ID NO: 1893549 - DNA, 15 bp, Homo sapiens
ggtgtggggagggga

SEQ ID NO: 1893550 - DNA, 15 bp, Homo sapiens
gtgtggggaggggaa

SEQ ID NO: 1893551 - DNA, 15 bp, Homo sapiens
tgtggggaggggaaa

SEQ ID NO: 1893552 - DNA, 15 bp, Homo sapiens
gtggggaggggaaat

SEQ ID NO: 1893553 - DNA, 15 bp, Homo sapiens
tggggaggggaaatt

SEQ ID NO: 1893554 - DNA, 15 bp, Homo sapiens
ggggaggggaaatta

SEQ ID NO: 1893555 - DNA, 15 bp, Homo sapiens
gggaggggaaattaa

SEQ ID NO: 1893556 - DNA, 15 bp, Homo sapiens
ggaggggaaattaag

SEQ ID NO: 1893557 - DNA, 15 bp, Homo sapiens
gaggggaaattaagg

SEQ ID NO: 1893558 - DNA, 15 bp, Homo sapiens
aggggaaattaaggt

SEQ ID NO: 1893559 - DNA, 15 bp, Homo sapiens
ggggaaattaaggtg

SEQ ID NO: 1893560 - DNA, 15 bp, Homo sapiens
gggaaattaaggtgc

SEQ ID NO: 1893561 - DNA, 15 bp, Homo sapiens
ggaaattaaggtgca

SEQ ID NO: 1893562 - DNA, 15 bp, Homo sapiens
gaaattaaggtgcag

SEQ ID NO: 1893563 - DNA, 15 bp, Homo sapiens
aaattaaggtgcaga

SEQ ID NO: 1893564 - DNA, 15 bp, Homo sapiens
aattaaggtgcagat

SEQ ID NO: 1893565 - DNA, 15 bp, Homo sapiens
attaaggtgcagatg

SEQ ID NO: 1893566 - DNA, 15 bp, Homo sapiens
ttaaggtgcagatgg

SEQ ID NO: 1893567 - DNA, 15 bp, Homo sapiens
taaggtgcagatggc

SEQ ID NO: 1893568 - DNA, 15 bp, Homo sapiens
aaggtgcagatggca

SEQ ID NO: 1893569 - DNA, 15 bp, Homo sapiens
aggtgcagatggcaa

SEQ ID NO: 1893570 - DNA, 15 bp, Homo sapiens
ggtgcagatggcaaa

SEQ ID NO: 1893571 - DNA, 15 bp, Homo sapiens
gtgcagatggcaaag

SEQ ID NO: 1893572 - DNA, 15 bp, Homo sapiens
tgcagatggcaaagt

SEQ ID NO: 1893573 - DNA, 15 bp, Homo sapiens
gcagatggcaaagtt

SEQ ID NO: 1893574 - DNA, 15 bp, Homo sapiens
cagatggcaaagttc

SEQ ID NO: 1893575 - DNA, 15 bp, Homo sapiens
agatggcaaagttca

SEQ ID NO: 1893576 - DNA, 15 bp, Homo sapiens
gatggcaaagttcat

SEQ ID NO: 1893577 - DNA, 15 bp, Homo sapiens
atggcaaagttcatg

SEQ ID NO: 1893578 - DNA, 15 bp, Homo sapiens
tggcaaagttcatgc

SEQ ID NO: 1893579 - DNA, 15 bp, Homo sapiens
ggcaaagttcatgct

SEQ ID NO: 1893580 - DNA, 15 bp, Homo sapiens
gcaaagttcatgctc

SEQ ID NO: 1893581 - DNA, 15 bp, Homo sapiens
caaagttcatgctct

SEQ ID NO: 1893582 - DNA, 15 bp, Homo sapiens
aaagttcatgctctt

SEQ ID NO: 1893583 - DNA, 15 bp, Homo sapiens
aagttcatgctcttg

SEQ ID NO: 1893584 - DNA, 15 bp, Homo sapiens
agttcatgctcttgg

SEQ ID NO: 1893585 - DNA, 15 bp, Homo sapiens
gttcatgctcttggg

SEQ ID NO: 1893586 - DNA, 15 bp, Homo sapiens
ttcatgctcttgggg

SEQ ID NO: 1893587 - DNA, 15 bp, Homo sapiens
tcatgctcttggggg

SEQ ID NO: 1893588 - DNA, 15 bp, Homo sapiens
catgctcttgggggt

SEQ ID NO: 1893589 - DNA, 15 bp, Homo sapiens
atgctcttgggggtc

SEQ ID NO: 1893590 - DNA, 15 bp, Homo sapiens
tgctcttgggggtct

SEQ ID NO: 1893591 - DNA, 15 bp, Homo sapiens
gctcttgggggtctt

SEQ ID NO: 1893592 - DNA, 15 bp, Homo sapiens
ctcttgggggtctta

SEQ ID NO: 1893593 - DNA, 15 bp, Homo sapiens
tcttgggggtcttat

SEQ ID NO: 1893594 - DNA, 15 bp, Homo sapiens
cttgggggtcttatg

SEQ ID NO: 1893595 - DNA, 15 bp, Homo sapiens
ttgggggtcttatga

SEQ ID NO: 1893596 - DNA, 15 bp, Homo sapiens
tgggggtcttatgat

SEQ ID NO: 1893597 - DNA, 15 bp, Homo sapiens
gggggtcttatgatt

SEQ ID NO: 1893598 - DNA, 15 bp, Homo sapiens
ggggtcttatgattt

SEQ ID NO: 1893599 - DNA, 15 bp, Homo sapiens
gggtcttatgattta

SEQ ID NO: 1893600 - DNA, 15 bp, Homo sapiens
ggtcttatgatttag

SEQ ID NO: 1893601 - DNA, 15 bp, Homo sapiens
gtcttatgatttagc

SEQ ID NO: 1893602 - DNA, 15 bp, Homo sapiens
tcttatgatttagca

SEQ ID NO: 1893603 - DNA, 15 bp, Homo sapiens
cttatgatttagcag

SEQ ID NO: 1893604 - DNA, 15 bp, Homo sapiens
ttatgatttagcaga

SEQ ID NO: 1893605 - DNA, 15 bp, Homo sapiens
tatgatttagcagag

SEQ ID NO: 1893606 - DNA, 15 bp, Homo sapiens
atgatttagcagagg

SEQ ID NO: 1893607 - DNA, 15 bp, Homo sapiens
tgatttagcagagga

SEQ ID NO: 1893608 - DNA, 15 bp, Homo sapiens
gatttagcagaggaa

SEQ ID NO: 1893609 - DNA, 15 bp, Homo sapiens
atttagcagaggaac

SEQ ID NO: 1893610 - DNA, 15 bp, Homo sapiens
tttagcagaggaaca

SEQ ID NO: 1893611 - DNA, 15 bp, Homo sapiens
ttagcagaggaacaa

SEQ ID NO: 1893612 - DNA, 15 bp, Homo sapiens
tagcagaggaacaag

SEQ ID NO: 1893613 - DNA, 15 bp, Homo sapiens
agcagaggaacaaga

SEQ ID NO: 1893614 - DNA, 15 bp, Homo sapiens
gcagaggaacaagat

SEQ ID NO: 1893615 - DNA, 15 bp, Homo sapiens
cagaggaacaagata

SEQ ID NO: 1893616 - DNA, 15 bp, Homo sapiens
agaggaacaagatac

SEQ ID NO: 1893617 - DNA, 15 bp, Homo sapiens
gaggaacaagataca

SEQ ID NO: 1893618 - DNA, 15 bp, Homo sapiens
aggaacaagatacac

SEQ ID NO: 1893619 - DNA, 15 bp, Homo sapiens
ggaacaagatacaca

SEQ ID NO: 1893620 - DNA, 15 bp, Homo sapiens
gaacaagatacacaa

SEQ ID NO: 1893621 - DNA, 15 bp, Homo sapiens
aacaagatacacaat

SEQ ID NO: 1893622 - DNA, 15 bp, Homo sapiens
acaagatacacaata

SEQ ID NO: 1893623 - DNA, 15 bp, Homo sapiens
caagatacacaataa

SEQ ID NO: 1893624 - DNA, 15 bp, Homo sapiens
aagatacacaataac

SEQ ID NO: 1893625 - DNA, 15 bp, Homo sapiens
agatacacaataact

SEQ ID NO: 1893626 - DNA, 15 bp, Homo sapiens
gatacacaataacta

SEQ ID NO: 1893627 - DNA, 15 bp, Homo sapiens
atacacaataactaa

SEQ ID NO: 1893628 - DNA, 15 bp, Homo sapiens
tacacaataactaat

SEQ ID NO: 1893629 - DNA, 15 bp, Homo sapiens
acacaataactaata

SEQ ID NO: 1893630 - DNA, 15 bp, Homo sapiens
cacaataactaatat

SEQ ID NO: 1893631 - DNA, 15 bp, Homo sapiens
acaataactaatata

SEQ ID NO: 1893632 - DNA, 15 bp, Homo sapiens
caataactaatataa

SEQ ID NO: 1893633 - DNA, 15 bp, Homo sapiens
aataactaatataag

SEQ ID NO: 1893634 - DNA, 15 bp, Homo sapiens
ataactaatataagg

SEQ ID NO: 1893635 - DNA, 15 bp, Homo sapiens
taactaatataaggt

SEQ ID NO: 1893636 - DNA, 15 bp, Homo sapiens
aactaatataaggtg

SEQ ID NO: 1893637 - DNA, 15 bp, Homo sapiens
actaatataaggtgg

SEQ ID NO: 1893638 - DNA, 15 bp, Homo sapiens
ctaatataaggtggc

SEQ ID NO: 1893639 - DNA, 15 bp, Homo sapiens
taatataaggtggcg

SEQ ID NO: 1893640 - DNA, 15 bp, Homo sapiens
aatataaggtggcgt

SEQ ID NO: 1893641 - DNA, 15 bp, Homo sapiens
atataaggtggcgtg

SEQ ID NO: 1893642 - DNA, 15 bp, Homo sapiens
tataaggtggcgtgt

SEQ ID NO: 1893643 - DNA, 15 bp, Homo sapiens
ataaggtggcgtgtg

SEQ ID NO: 1893644 - DNA, 15 bp, Homo sapiens
taaggtggcgtgtga

SEQ ID NO: 1893645 - DNA, 15 bp, Homo sapiens
aaggtggcgtgtgat

SEQ ID NO: 1893646 - DNA, 15 bp, Homo sapiens
aggtggcgtgtgatt

SEQ ID NO: 1893647 - DNA, 15 bp, Homo sapiens
ggtggcgtgtgatta

SEQ ID NO: 1893648 - DNA, 15 bp, Homo sapiens
gtggcgtgtgattag

SEQ ID NO: 1893649 - DNA, 15 bp, Homo sapiens
tggcgtgtgattagt

SEQ ID NO: 1893650 - DNA, 15 bp, Homo sapiens
ggcgtgtgattagta

SEQ ID NO: 1893651 - DNA, 15 bp, Homo sapiens
gcgtgtgattagtac

SEQ ID NO: 1893652 - DNA, 15 bp, Homo sapiens
cgtgtgattagtaca

SEQ ID NO: 1893653 - DNA, 15 bp, Homo sapiens
gtgtgattagtacac

SEQ ID NO: 1893654 - DNA, 15 bp, Homo sapiens
tgtgattagtacaca

SEQ ID NO: 1893655 - DNA, 15 bp, Homo sapiens
gtgattagtacacat

SEQ ID NO: 1893656 - DNA, 15 bp, Homo sapiens
tgattagtacacata

SEQ ID NO: 1893657 - DNA, 15 bp, Homo sapiens
gattagtacacatac

SEQ ID NO: 1893658 - DNA, 15 bp, Homo sapiens
attagtacacataca

SEQ ID NO: 1893659 - DNA, 15 bp, Homo sapiens
ttagtacacatacac

SEQ ID NO: 1893660 - DNA, 15 bp, Homo sapiens
tagtacacatacaca

SEQ ID NO: 1893661 - DNA, 15 bp, Homo sapiens
agtacacatacacaa

SEQ ID NO: 1893662 - DNA, 15 bp, Homo sapiens
gtacacatacacaaa

SEQ ID NO: 1893663 - DNA, 15 bp, Homo sapiens
tacacatacacaaag

SEQ ID NO: 1893664 - DNA, 15 bp, Homo sapiens
acacatacacaaaga

SEQ ID NO: 1893665 - DNA, 15 bp, Homo sapiens
cacatacacaaagat

SEQ ID NO: 1893666 - DNA, 15 bp, Homo sapiens
acatacacaaagatt

SEQ ID NO: 1893667 - DNA, 15 bp, Homo sapiens
catacacaaagattg

SEQ ID NO: 1893668 - DNA, 15 bp, Homo sapiens
atacacaaagattgg

SEQ ID NO: 1893669 - DNA, 15 bp, Homo sapiens
tacacaaagattgga

SEQ ID NO: 1893670 - DNA, 15 bp, Homo sapiens
acacaaagattggag

SEQ ID NO: 1893671 - DNA, 15 bp, Homo sapiens
cacaaagattggaga

SEQ ID NO: 1893672 - DNA, 15 bp, Homo sapiens
acaaagattggagag

SEQ ID NO: 1893673 - DNA, 15 bp, Homo sapiens
caaagattggagaga

SEQ ID NO: 1893674 - DNA, 15 bp, Homo sapiens
aaagattggagagaa

SEQ ID NO: 1893675 - DNA, 15 bp, Homo sapiens
aagattggagagaac

SEQ ID NO: 1893676 - DNA, 15 bp, Homo sapiens
agattggagagaact

SEQ ID NO: 1893677 - DNA, 15 bp, Homo sapiens
gattggagagaactt

SEQ ID NO: 1893678 - DNA, 15 bp, Homo sapiens
attggagagaactta

SEQ ID NO: 1893679 - DNA, 15 bp, Homo sapiens
ttggagagaacttag

SEQ ID NO: 1893680 - DNA, 15 bp, Homo sapiens
tggagagaacttaga

SEQ ID NO: 1893681 - DNA, 15 bp, Homo sapiens
ggagagaacttagag

SEQ ID NO: 1893682 - DNA, 15 bp, Homo sapiens
gagagaacttagagg

SEQ ID NO: 1893683 - DNA, 15 bp, Homo sapiens
agagaacttagagga

SEQ ID NO: 1893684 - DNA, 15 bp, Homo sapiens
gagaacttagaggag

SEQ ID NO: 1893685 - DNA, 15 bp, Homo sapiens
agaacttagaggaga

SEQ ID NO: 1893686 - DNA, 15 bp, Homo sapiens
gaacttagaggagaa

SEQ ID NO: 1893687 - DNA, 15 bp, Homo sapiens
aacttagaggagaaa

SEQ ID NO: 1893688 - DNA, 15 bp, Homo sapiens
acttagaggagaaac

SEQ ID NO: 1893689 - DNA, 15 bp, Homo sapiens
cttagaggagaaaca

SEQ ID NO: 1893690 - DNA, 15 bp, Homo sapiens
ttagaggagaaacag

SEQ ID NO: 1893691 - DNA, 15 bp, Homo sapiens
tagaggagaaacagc

SEQ ID NO: 1893692 - DNA, 15 bp, Homo sapiens
agaggagaaacagca

SEQ ID NO: 1893693 - DNA, 15 bp, Homo sapiens
gaggagaaacagcat

SEQ ID NO: 1893694 - DNA, 15 bp, Homo sapiens
aggagaaacagcatt

SEQ ID NO: 1893695 - DNA, 15 bp, Homo sapiens
ggagaaacagcatta

SEQ ID NO: 1893696 - DNA, 15 bp, Homo sapiens
gagaaacagcattac

SEQ ID NO: 1893697 - DNA, 15 bp, Homo sapiens
agaaacagcattacc

SEQ ID NO: 1893698 - DNA, 15 bp, Homo sapiens
gaaacagcattacct

SEQ ID NO: 1893699 - DNA, 15 bp, Homo sapiens
aaacagcattacctc

SEQ ID NO: 1893700 - DNA, 15 bp, Homo sapiens
aacagcattacctca

SEQ ID NO: 1893701 - DNA, 15 bp, Homo sapiens
acagcattacctcat

SEQ ID NO: 1893702 - DNA, 15 bp, Homo sapiens
cagcattacctcatg

SEQ ID NO: 1893703 - DNA, 15 bp, Homo sapiens
agcattacctcatgg

SEQ ID NO: 1893704 - DNA, 15 bp, Homo sapiens
gcattacctcatggc

SEQ ID NO: 1893705 - DNA, 15 bp, Homo sapiens
cattacctcatggcc

SEQ ID NO: 1893706 - DNA, 15 bp, Homo sapiens
attacctcatggcct

SEQ ID NO: 1893707 - DNA, 15 bp, Homo sapiens
ttacctcatggccta

SEQ ID NO: 1893708 - DNA, 15 bp, Homo sapiens
gtgctgaaggctgga

SEQ ID NO: 1893709 - DNA, 15 bp, Homo sapiens
tgctgaaggctggat

SEQ ID NO: 1893710 - DNA, 15 bp, Homo sapiens
gctgaaggctggatg

SEQ ID NO: 1893711 - DNA, 15 bp, Homo sapiens
ctgaaggctggatgg

SEQ ID NO: 1893712 - DNA, 15 bp, Homo sapiens
tgaaggctggatgga

SEQ ID NO: 1893713 - DNA, 15 bp, Homo sapiens
gaaggctggatggag

SEQ ID NO: 1893714 - DNA, 15 bp, Homo sapiens
aaggctggatggaga

SEQ ID NO: 1893715 - DNA, 15 bp, Homo sapiens
aggctggatggagac

SEQ ID NO: 1893716 - DNA, 15 bp, Homo sapiens
ggctggatggagact

SEQ ID NO: 1893717 - DNA, 15 bp, Homo sapiens
gctggatggagactt

SEQ ID NO: 1893718 - DNA, 15 bp, Homo sapiens
ctggatggagacttg

SEQ ID NO: 1893719 - DNA, 15 bp, Homo sapiens
tggatggagacttgc

SEQ ID NO: 1893720 - DNA, 15 bp, Homo sapiens
ggatggagacttgcg

SEQ ID NO: 1893721 - DNA, 15 bp, Homo sapiens
gatggagacttgcga

SEQ ID NO: 1893722 - DNA, 15 bp, Homo sapiens
atggagacttgcgac

SEQ ID NO: 1893723 - DNA, 15 bp, Homo sapiens
tggagacttgcgacc

SEQ ID NO: 1893724 - DNA, 15 bp, Homo sapiens
ggagacttgcgacca

SEQ ID NO: 1893725 - DNA, 15 bp, Homo sapiens
gagacttgcgaccag

SEQ ID NO: 1893726 - DNA, 15 bp, Homo sapiens
agacttgcgaccagc

SEQ ID NO: 1893727 - DNA, 15 bp, Homo sapiens
gacttgcgaccagca

SEQ ID NO: 1893728 - DNA, 15 bp, Homo sapiens
acttgcgaccagcag

SEQ ID NO: 1893729 - DNA, 15 bp, Homo sapiens
cttgcgaccagcaga

SEQ ID NO: 1893730 - DNA, 15 bp, Homo sapiens
ttgcgaccagcagat

SEQ ID NO: 1893731 - DNA, 15 bp, Homo sapiens
tgcgaccagcagatg

SEQ ID NO: 1893732 - DNA, 15 bp, Homo sapiens
gcgaccagcagatgg

SEQ ID NO: 1893733 - DNA, 15 bp, Homo sapiens
cgaccagcagatggg

SEQ ID NO: 1893734 - DNA, 15 bp, Homo sapiens
gaccagcagatgggc

SEQ ID NO: 1893735 - DNA, 15 bp, Homo sapiens
accagcagatgggcc

SEQ ID NO: 1893736 - DNA, 15 bp, Homo sapiens
ccagcagatgggcct

SEQ ID NO: 1893737 - DNA, 15 bp, Homo sapiens
cagcagatgggcctc

SEQ ID NO: 1893738 - DNA, 15 bp, Homo sapiens
agcagatgggcctcc

SEQ ID NO: 1893739 - DNA, 15 bp, Homo sapiens
gcagatgggcctcca

SEQ ID NO: 1893740 - DNA, 15 bp, Homo sapiens
cagatgggcctccaa

SEQ ID NO: 1893741 - DNA, 15 bp, Homo sapiens
agatgggcctccaaa

SEQ ID NO: 1893742 - DNA, 15 bp, Homo sapiens
gatgggcctccaaag

SEQ ID NO: 1893743 - DNA, 15 bp, Homo sapiens
atgggcctccaaagg

SEQ ID NO: 1893744 - DNA, 15 bp, Homo sapiens
tgggcctccaaaggc

SEQ ID NO: 1893745 - DNA, 15 bp, Homo sapiens
gggcctccaaaggct

SEQ ID NO: 1893746 - DNA, 15 bp, Homo sapiens
ggcctccaaaggctg

SEQ ID NO: 1893747 - DNA, 15 bp, Homo sapiens
gcctccaaaggctgg

SEQ ID NO: 1893748 - DNA, 15 bp, Homo sapiens
cctccaaaggctggg

SEQ ID NO: 1893749 - DNA, 15 bp, Homo sapiens
ctccaaaggctgggt

SEQ ID NO: 1893750 - DNA, 15 bp, Homo sapiens
tccaaaggctgggtc

SEQ ID NO: 1893751 - DNA, 15 bp, Homo sapiens
ccaaaggctgggtca

SEQ ID NO: 1893752 - DNA, 15 bp, Homo sapiens
caaaggctgggtcag

SEQ ID NO: 1893753 - DNA, 15 bp, Homo sapiens
aaaggctgggtcaga

SEQ ID NO: 1893754 - DNA, 15 bp, Homo sapiens
aaggctgggtcagat

SEQ ID NO: 1893755 - DNA, 15 bp, Homo sapiens
aggctgggtcagatg

SEQ ID NO: 1893756 - DNA, 15 bp, Homo sapiens
ggctgggtcagatgt

SEQ ID NO: 1893757 - DNA, 15 bp, Homo sapiens
gctgggtcagatgtt

SEQ ID NO: 1893758 - DNA, 15 bp, Homo sapiens
ctgggtcagatgttg

SEQ ID NO: 1893759 - DNA, 15 bp, Homo sapiens
tgggtcagatgttgg

SEQ ID NO: 1893760 - DNA, 15 bp, Homo sapiens
gggtcagatgttggc

SEQ ID NO: 1893761 - DNA, 15 bp, Homo sapiens
ggtcagatgttggct

SEQ ID NO: 1893762 - DNA, 15 bp, Homo sapiens
gtcagatgttggcta

SEQ ID NO: 1893763 - DNA, 15 bp, Homo sapiens
tcagatgttggctat

SEQ ID NO: 1893764 - DNA, 15 bp, Homo sapiens
cagatgttggctatg

SEQ ID NO: 1893765 - DNA, 15 bp, Homo sapiens
agatgttggctatgg

SEQ ID NO: 1893766 - DNA, 15 bp, Homo sapiens
gatgttggctatggt

SEQ ID NO: 1893767 - DNA, 15 bp, Homo sapiens
atgttggctatggtt

SEQ ID NO: 1893768 - DNA, 15 bp, Homo sapiens
tgttggctatggttt

SEQ ID NO: 1893769 - DNA, 15 bp, Homo sapiens
gttggctatggtttg

SEQ ID NO: 1893770 - DNA, 15 bp, Homo sapiens
ttggctatggtttgt

SEQ ID NO: 1893771 - DNA, 15 bp, Homo sapiens
tggctatggtttgtc

SEQ ID NO: 1893772 - DNA, 15 bp, Homo sapiens
ggctatggtttgtca

SEQ ID NO: 1893773 - DNA, 15 bp, Homo sapiens
gctatggtttgtcag

SEQ ID NO: 1893774 - DNA, 15 bp, Homo sapiens
ctatggtttgtcagg

SEQ ID NO: 1893775 - DNA, 15 bp, Homo sapiens
tatggtttgtcaggt

SEQ ID NO: 1893776 - DNA, 15 bp, Homo sapiens
atggtttgtcaggtg

SEQ ID NO: 1893777 - DNA, 15 bp, Homo sapiens
tggtttgtcaggtgt

SEQ ID NO: 1893778 - DNA, 15 bp, Homo sapiens
ggtttgtcaggtgtg

SEQ ID NO: 1893779 - DNA, 15 bp, Homo sapiens
gtttgtcaggtgtgc

SEQ ID NO: 1893780 - DNA, 15 bp, Homo sapiens
tttgtcaggtgtgct

SEQ ID NO: 1893781 - DNA, 15 bp, Homo sapiens
ttgtcaggtgtgcta

SEQ ID NO: 1893782 - DNA, 15 bp, Homo sapiens
tgtcaggtgtgctat

SEQ ID NO: 1893783 - DNA, 15 bp, Homo sapiens
gtcaggtgtgctatt

SEQ ID NO: 1893784 - DNA, 15 bp, Homo sapiens
tcaggtgtgctattt

SEQ ID NO: 1893785 - DNA, 15 bp, Homo sapiens
caggtgtgctatttt

SEQ ID NO: 1893786 - DNA, 15 bp, Homo sapiens
aggtgtgctattttt

SEQ ID NO: 1893787 - DNA, 15 bp, Homo sapiens
ggtgtgctatttttt

SEQ ID NO: 1893788 - DNA, 15 bp, Homo sapiens
gtgtgctattttttc

SEQ ID NO: 1893789 - DNA, 15 bp, Homo sapiens
tgtgctattttttca

SEQ ID NO: 1893790 - DNA, 15 bp, Homo sapiens
gtgctattttttcat

SEQ ID NO: 1893791 - DNA, 15 bp, Homo sapiens
tgctattttttcatt

SEQ ID NO: 1893792 - DNA, 15 bp, Homo sapiens
gctattttttcattt

SEQ ID NO: 1893793 - DNA, 15 bp, Homo sapiens
ctattttttcatttc

SEQ ID NO: 1893794 - DNA, 15 bp, Homo sapiens
tattttttcatttcc

SEQ ID NO: 1893795 - DNA, 15 bp, Homo sapiens
attttttcatttccc

SEQ ID NO: 1893796 - DNA, 15 bp, Homo sapiens
ttttttcatttccca

SEQ ID NO: 1893797 - DNA, 15 bp, Homo sapiens
tttttcatttcccat

SEQ ID NO: 1893798 - DNA, 15 bp, Homo sapiens
ttttcatttcccata

SEQ ID NO: 1893799 - DNA, 15 bp, Homo sapiens
tttcatttcccatag

SEQ ID NO: 1893800 - DNA, 15 bp, Homo sapiens
ttcatttcccatagg

SEQ ID NO: 1893801 - DNA, 15 bp, Homo sapiens
tcatttcccataggc

SEQ ID NO: 1893802 - DNA, 15 bp, Homo sapiens
catttcccataggct

SEQ ID NO: 1893803 - DNA, 15 bp, Homo sapiens
atttcccataggctt

SEQ ID NO: 1893804 - DNA, 15 bp, Homo sapiens
tttcccataggcttc

SEQ ID NO: 1893805 - DNA, 15 bp, Homo sapiens
ttcccataggcttcc

SEQ ID NO: 1893806 - DNA, 15 bp, Homo sapiens
tcccataggcttcca

SEQ ID NO: 1893807 - DNA, 15 bp, Homo sapiens
cccataggcttccaa

SEQ ID NO: 1893808 - DNA, 15 bp, Homo sapiens
ccataggcttccaac

SEQ ID NO: 1893809 - DNA, 15 bp, Homo sapiens
cataggcttccaact

SEQ ID NO: 1893810 - DNA, 15 bp, Homo sapiens
ataggcttccaactc

SEQ ID NO: 1893811 - DNA, 15 bp, Homo sapiens
taggcttccaactct

SEQ ID NO: 1893812 - DNA, 15 bp, Homo sapiens
aggcttccaactctt

SEQ ID NO: 1893813 - DNA, 15 bp, Homo sapiens
ggcttccaactcttt

SEQ ID NO: 1893814 - DNA, 15 bp, Homo sapiens
gcttccaactctttc

SEQ ID NO: 1893815 - DNA, 15 bp, Homo sapiens
cttccaactctttcc

SEQ ID NO: 1893816 - DNA, 15 bp, Homo sapiens
ttccaactctttccc

SEQ ID NO: 1893817 - DNA, 15 bp, Homo sapiens
tccaactctttccca

SEQ ID NO: 1893818 - DNA, 15 bp, Homo sapiens
ccaactctttcccaa

SEQ ID NO: 1893819 - DNA, 15 bp, Homo sapiens
caactctttcccaag

SEQ ID NO: 1893820 - DNA, 15 bp, Homo sapiens
aactctttcccaagc

SEQ ID NO: 1893821 - DNA, 15 bp, Homo sapiens
actctttcccaagct

SEQ ID NO: 1893822 - DNA, 15 bp, Homo sapiens
ctctttcccaagctc

SEQ ID NO: 1893823 - DNA, 15 bp, Homo sapiens
tctttcccaagctct

SEQ ID NO: 1893824 - DNA, 15 bp, Homo sapiens
ctttcccaagctctg

SEQ ID NO: 1893825 - DNA, 15 bp, Homo sapiens
tttcccaagctctgg

SEQ ID NO: 1893826 - DNA, 15 bp, Homo sapiens
ttcccaagctctgga

SEQ ID NO: 1893827 - DNA, 15 bp, Homo sapiens
tcccaagctctggag

SEQ ID NO: 1893828 - DNA, 15 bp, Homo sapiens
cccaagctctggagt

SEQ ID NO: 1893829 - DNA, 15 bp, Homo sapiens
ccaagctctggagtc

SEQ ID NO: 1893830 - DNA, 15 bp, Homo sapiens
caagctctggagtca

SEQ ID NO: 1893831 - DNA, 15 bp, Homo sapiens
aagctctggagtcag

SEQ ID NO: 1893832 - DNA, 15 bp, Homo sapiens
agctctggagtcagt

SEQ ID NO: 1893833 - DNA, 15 bp, Homo sapiens
gctctggagtcagtg

SEQ ID NO: 1893834 - DNA, 15 bp, Homo sapiens
ctctggagtcagtgc

SEQ ID NO: 1893835 - DNA, 15 bp, Homo sapiens
tctggagtcagtgcc

SEQ ID NO: 1893836 - DNA, 15 bp, Homo sapiens
ctggagtcagtgcca

SEQ ID NO: 1893837 - DNA, 15 bp, Homo sapiens
tggagtcagtgccac

SEQ ID NO: 1893838 - DNA, 15 bp, Homo sapiens
ggagtcagtgccacc

SEQ ID NO: 1893839 - DNA, 15 bp, Homo sapiens
gagtcagtgccacca

SEQ ID NO: 1893840 - DNA, 15 bp, Homo sapiens
agtcagtgccaccat

SEQ ID NO: 1893841 - DNA, 15 bp, Homo sapiens
gtcagtgccaccata

SEQ ID NO: 1893842 - DNA, 15 bp, Homo sapiens
tcagtgccaccataa

SEQ ID NO: 1893843 - DNA, 15 bp, Homo sapiens
cagtgccaccataaa

SEQ ID NO: 1893844 - DNA, 15 bp, Homo sapiens
agtgccaccataaag

SEQ ID NO: 1893845 - DNA, 15 bp, Homo sapiens
gtgccaccataaaga

SEQ ID NO: 1893846 - DNA, 15 bp, Homo sapiens
tgccaccataaagac

SEQ ID NO: 1893847 - DNA, 15 bp, Homo sapiens
gccaccataaagacc

SEQ ID NO: 1893848 - DNA, 15 bp, Homo sapiens
ccaccataaagacct

SEQ ID NO: 1893849 - DNA, 15 bp, Homo sapiens
caccataaagacctc

SEQ ID NO: 1893850 - DNA, 15 bp, Homo sapiens
accataaagacctcc

SEQ ID NO: 1893851 - DNA, 15 bp, Homo sapiens
ccataaagacctccc

SEQ ID NO: 1893852 - DNA, 15 bp, Homo sapiens
cataaagacctcccc

SEQ ID NO: 1893853 - DNA, 15 bp, Homo sapiens
ataaagacctcccct

SEQ ID NO: 1893854 - DNA, 15 bp, Homo sapiens
taaagacctcccctg

SEQ ID NO: 1893855 - DNA, 15 bp, Homo sapiens
aaagacctcccctga

SEQ ID NO: 1893856 - DNA, 15 bp, Homo sapiens
aagacctcccctgag

SEQ ID NO: 1893857 - DNA, 15 bp, Homo sapiens
agacctcccctgaga

SEQ ID NO: 1893858 - DNA, 15 bp, Homo sapiens
gacctcccctgagag

SEQ ID NO: 1893859 - DNA, 15 bp, Homo sapiens
acctcccctgagagt

SEQ ID NO: 1893860 - DNA, 15 bp, Homo sapiens
cctcccctgagagtg

SEQ ID NO: 1893861 - DNA, 15 bp, Homo sapiens
ctcccctgagagtgc

SEQ ID NO: 1893862 - DNA, 15 bp, Homo sapiens
tcccctgagagtgca

SEQ ID NO: 1893863 - DNA, 15 bp, Homo sapiens
cccctgagagtgcag

SEQ ID NO: 1893864 - DNA, 15 bp, Homo sapiens
ccctgagagtgcagt

SEQ ID NO: 1893865 - DNA, 15 bp, Homo sapiens
cctgagagtgcagtt

SEQ ID NO: 1893866 - DNA, 15 bp, Homo sapiens
ctgagagtgcagttt

SEQ ID NO: 1893867 - DNA, 15 bp, Homo sapiens
tgagagtgcagttta

SEQ ID NO: 1893868 - DNA, 15 bp, Homo sapiens
gagagtgcagtttac

SEQ ID NO: 1893869 - DNA, 15 bp, Homo sapiens
agagtgcagtttact

SEQ ID NO: 1893870 - DNA, 15 bp, Homo sapiens
gagtgcagtttactc

SEQ ID NO: 1893871 - DNA, 15 bp, Homo sapiens
agtgcagtttactcc

SEQ ID NO: 1893872 - DNA, 15 bp, Homo sapiens
gtgcagtttactcca

SEQ ID NO: 1893873 - DNA, 15 bp, Homo sapiens
tgcagtttactccag

SEQ ID NO: 1893874 - DNA, 15 bp, Homo sapiens
gcagtttactccagc

SEQ ID NO: 1893875 - DNA, 15 bp, Homo sapiens
cagtttactccagcc

SEQ ID NO: 1893876 - DNA, 15 bp, Homo sapiens
agtttactccagccc

SEQ ID NO: 1893877 - DNA, 15 bp, Homo sapiens
gtttactccagccct

SEQ ID NO: 1893878 - DNA, 15 bp, Homo sapiens
tttactccagccctg

SEQ ID NO: 1893879 - DNA, 15 bp, Homo sapiens
ttactccagccctga

SEQ ID NO: 1893880 - DNA, 15 bp, Homo sapiens
tactccagccctgat

SEQ ID NO: 1893881 - DNA, 15 bp, Homo sapiens
actccagccctgata

SEQ ID NO: 1893882 - DNA, 15 bp, Homo sapiens
ctccagccctgatat

SEQ ID NO: 1893883 - DNA, 15 bp, Homo sapiens
tccagccctgatatt

SEQ ID NO: 1893884 - DNA, 15 bp, Homo sapiens
ccagccctgatattt

SEQ ID NO: 1893885 - DNA, 15 bp, Homo sapiens
cagccctgatatttc

SEQ ID NO: 1893886 - DNA, 15 bp, Homo sapiens
agccctgatatttcc

SEQ ID NO: 1893887 - DNA, 15 bp, Homo sapiens
gccctgatatttccc

SEQ ID NO: 1893888 - DNA, 15 bp, Homo sapiens
ccctgatatttccct

SEQ ID NO: 1893889 - DNA, 15 bp, Homo sapiens
cctgatatttccctt

SEQ ID NO: 1893890 - DNA, 15 bp, Homo sapiens
ctgatatttcccttt

SEQ ID NO: 1893891 - DNA, 15 bp, Homo sapiens
tgatatttccctttt

SEQ ID NO: 1893892 - DNA, 15 bp, Homo sapiens
gatatttcccttttg

SEQ ID NO: 1893893 - DNA, 15 bp, Homo sapiens
atatttcccttttgg

SEQ ID NO: 1893894 - DNA, 15 bp, Homo sapiens
tatttcccttttggt

SEQ ID NO: 1893895 - DNA, 15 bp, Homo sapiens
atttcccttttggtc

SEQ ID NO: 1893896 - DNA, 15 bp, Homo sapiens
tttcccttttggtct

SEQ ID NO: 1893897 - DNA, 15 bp, Homo sapiens
ttcccttttggtctt

SEQ ID NO: 1893898 - DNA, 15 bp, Homo sapiens
tcccttttggtcttc

SEQ ID NO: 1893899 - DNA, 15 bp, Homo sapiens
cccttttggtcttct

SEQ ID NO: 1893900 - DNA, 15 bp, Homo sapiens
ccttttggtcttctc

SEQ ID NO: 1893901 - DNA, 15 bp, Homo sapiens
cttttggtcttctcc

SEQ ID NO: 1893902 - DNA, 15 bp, Homo sapiens
ttttggtcttctcca

SEQ ID NO: 1893903 - DNA, 15 bp, Homo sapiens
tttggtcttctccac

SEQ ID NO: 1893904 - DNA, 15 bp, Homo sapiens
ttggtcttctccaca

SEQ ID NO: 1893905 - DNA, 15 bp, Homo sapiens
tggtcttctccacag

SEQ ID NO: 1893906 - DNA, 15 bp, Homo sapiens
ggtcttctccacagc

SEQ ID NO: 1893907 - DNA, 15 bp, Homo sapiens
gtcttctccacagct

SEQ ID NO: 1893908 - DNA, 15 bp, Homo sapiens
tcttctccacagctt

SEQ ID NO: 1893909 - DNA, 15 bp, Homo sapiens
cttctccacagcttt

SEQ ID NO: 1893910 - DNA, 15 bp, Homo sapiens
ttctccacagctttc

SEQ ID NO: 1893911 - DNA, 15 bp, Homo sapiens
tctccacagctttcc

SEQ ID NO: 1893912 - DNA, 15 bp, Homo sapiens
ctccacagctttcca

SEQ ID NO: 1893913 - DNA, 15 bp, Homo sapiens
tccacagctttccat

SEQ ID NO: 1893914 - DNA, 15 bp, Homo sapiens
ccacagctttccatg

SEQ ID NO: 1893915 - DNA, 15 bp, Homo sapiens
cacagctttccatga

SEQ ID NO: 1893916 - DNA, 15 bp, Homo sapiens
acagctttccatgaa

SEQ ID NO: 1893917 - DNA, 15 bp, Homo sapiens
cagctttccatgaag

SEQ ID NO: 1893918 - DNA, 15 bp, Homo sapiens
agctttccatgaagt

SEQ ID NO: 1893919 - DNA, 15 bp, Homo sapiens
gctttccatgaagtc

SEQ ID NO: 1893920 - DNA, 15 bp, Homo sapiens
ctttccatgaagtct

SEQ ID NO: 1893921 - DNA, 15 bp, Homo sapiens
tttccatgaagtctc

SEQ ID NO: 1893922 - DNA, 15 bp, Homo sapiens
ttccatgaagtctca

SEQ ID NO: 1893923 - DNA, 15 bp, Homo sapiens
tccatgaagtctcag

SEQ ID NO: 1893924 - DNA, 15 bp, Homo sapiens
ccatgaagtctcagt

SEQ ID NO: 1893925 - DNA, 15 bp, Homo sapiens
catgaagtctcagtt

SEQ ID NO: 1893926 - DNA, 15 bp, Homo sapiens
atgaagtctcagttt

SEQ ID NO: 1893927 - DNA, 15 bp, Homo sapiens
tgaagtctcagttta

SEQ ID NO: 1893928 - DNA, 15 bp, Homo sapiens
gaagtctcagtttac

SEQ ID NO: 1893929 - DNA, 15 bp, Homo sapiens
aagtctcagtttacc

SEQ ID NO: 1893930 - DNA, 15 bp, Homo sapiens
agtctcagtttaccc

SEQ ID NO: 1893931 - DNA, 15 bp, Homo sapiens
gtctcagtttaccca

SEQ ID NO: 1893932 - DNA, 15 bp, Homo sapiens
tctcagtttacccaa

SEQ ID NO: 1893933 - DNA, 15 bp, Homo sapiens
ctcagtttacccaaa

SEQ ID NO: 1893934 - DNA, 15 bp, Homo sapiens
tcagtttacccaaag

SEQ ID NO: 1893935 - DNA, 15 bp, Homo sapiens
cagtttacccaaaga

SEQ ID NO: 1893936 - DNA, 15 bp, Homo sapiens
agtttacccaaagaa

SEQ ID NO: 1893937 - DNA, 15 bp, Homo sapiens
gtttacccaaagaag

SEQ ID NO: 1893938 - DNA, 15 bp, Homo sapiens
tttacccaaagaagg

SEQ ID NO: 1893939 - DNA, 15 bp, Homo sapiens
ttacccaaagaagga

SEQ ID NO: 1893940 - DNA, 15 bp, Homo sapiens
tacccaaagaaggag

SEQ ID NO: 1893941 - DNA, 15 bp, Homo sapiens
acccaaagaaggagc

SEQ ID NO: 1893942 - DNA, 15 bp, Homo sapiens
cccaaagaaggagct

SEQ ID NO: 1893943 - DNA, 15 bp, Homo sapiens
ccaaagaaggagctt

SEQ ID NO: 1893944 - DNA, 15 bp, Homo sapiens
caaagaaggagcttc

SEQ ID NO: 1893945 - DNA, 15 bp, Homo sapiens
aaagaaggagcttcc

SEQ ID NO: 1893946 - DNA, 15 bp, Homo sapiens
aagaaggagcttccc

SEQ ID NO: 1893947 - DNA, 15 bp, Homo sapiens
agaaggagcttccct

SEQ ID NO: 1893948 - DNA, 15 bp, Homo sapiens
gaaggagcttccctt

SEQ ID NO: 1893949 - DNA, 15 bp, Homo sapiens
aaggagcttcccttc

SEQ ID NO: 1893950 - DNA, 15 bp, Homo sapiens
aggagcttcccttct

SEQ ID NO: 1893951 - DNA, 15 bp, Homo sapiens
ggagcttcccttctt

SEQ ID NO: 1893952 - DNA, 15 bp, Homo sapiens
gagcttcccttcttt

SEQ ID NO: 1893953 - DNA, 15 bp, Homo sapiens
agcttcccttcttta

SEQ ID NO: 1893954 - DNA, 15 bp, Homo sapiens
gcttcccttctttat

SEQ ID NO: 1893955 - DNA, 15 bp, Homo sapiens
cttcccttctttatt

SEQ ID NO: 1893956 - DNA, 15 bp, Homo sapiens
ttcccttctttattc

SEQ ID NO: 1893957 - DNA, 15 bp, Homo sapiens
tcccttctttattct

SEQ ID NO: 1893958 - DNA, 15 bp, Homo sapiens
cccttctttattctc

SEQ ID NO: 1893959 - DNA, 15 bp, Homo sapiens
ccttctttattctct

SEQ ID NO: 1893960 - DNA, 15 bp, Homo sapiens
cttctttattctctt

SEQ ID NO: 1893961 - DNA, 15 bp, Homo sapiens
ttctttattctcttt

SEQ ID NO: 1893962 - DNA, 15 bp, Homo sapiens
tctttattctcttta

SEQ ID NO: 1893963 - DNA, 15 bp, Homo sapiens
ctttattctctttac

SEQ ID NO: 1893964 - DNA, 15 bp, Homo sapiens
tttattctctttact

SEQ ID NO: 1893965 - DNA, 15 bp, Homo sapiens
ttattctctttactg

SEQ ID NO: 1893966 - DNA, 15 bp, Homo sapiens
tattctctttactgc

SEQ ID NO: 1893967 - DNA, 15 bp, Homo sapiens
attctctttactgct

SEQ ID NO: 1893968 - DNA, 15 bp, Homo sapiens
ttctctttactgctg

SEQ ID NO: 1893969 - DNA, 15 bp, Homo sapiens
tctctttactgctgg

SEQ ID NO: 1893970 - DNA, 15 bp, Homo sapiens
ctctttactgctgga

SEQ ID NO: 1893971 - DNA, 15 bp, Homo sapiens
tctttactgctggat

SEQ ID NO: 1893972 - DNA, 15 bp, Homo sapiens
ctttactgctggatt

SEQ ID NO: 1893973 - DNA, 15 bp, Homo sapiens
tttactgctggatta

SEQ ID NO: 1893974 - DNA, 15 bp, Homo sapiens
ttactgctggattat

SEQ ID NO: 1893975 - DNA, 15 bp, Homo sapiens
tactgctggattatg

SEQ ID NO: 1893976 - DNA, 15 bp, Homo sapiens
actgctggattatgt

SEQ ID NO: 1893977 - DNA, 15 bp, Homo sapiens
ctgctggattatgtt

SEQ ID NO: 1893978 - DNA, 15 bp, Homo sapiens
tgctggattatgttc

SEQ ID NO: 1893979 - DNA, 15 bp, Homo sapiens
gctggattatgttcc

SEQ ID NO: 1893980 - DNA, 15 bp, Homo sapiens
ctggattatgttcct

SEQ ID NO: 1893981 - DNA, 15 bp, Homo sapiens
tggattatgttcctt

SEQ ID NO: 1893982 - DNA, 15 bp, Homo sapiens
ggattatgttccttc

SEQ ID NO: 1893983 - DNA, 15 bp, Homo sapiens
gattatgttccttca

SEQ ID NO: 1893984 - DNA, 15 bp, Homo sapiens
attatgttccttcac

SEQ ID NO: 1893985 - DNA, 15 bp, Homo sapiens
ttatgttccttcaca

SEQ ID NO: 1893986 - DNA, 15 bp, Homo sapiens
tatgttccttcacag

SEQ ID NO: 1893987 - DNA, 15 bp, Homo sapiens
atgttccttcacagc

SEQ ID NO: 1893988 - DNA, 15 bp, Homo sapiens
tgttccttcacagcc

SEQ ID NO: 1893989 - DNA, 15 bp, Homo sapiens
gttccttcacagcca

SEQ ID NO: 1893990 - DNA, 15 bp, Homo sapiens
ttccttcacagccat

SEQ ID NO: 1893991 - DNA, 15 bp, Homo sapiens
tccttcacagccatg

SEQ ID NO: 1893992 - DNA, 15 bp, Homo sapiens
ccttcacagccatgc

SEQ ID NO: 1893993 - DNA, 15 bp, Homo sapiens
cttcacagccatgct

SEQ ID NO: 1893994 - DNA, 15 bp, Homo sapiens
ttcacagccatgctg

SEQ ID NO: 1893995 - DNA, 15 bp, Homo sapiens
tcacagccatgctgg

SEQ ID NO: 1893996 - DNA, 15 bp, Homo sapiens
cacagccatgctggc

SEQ ID NO: 1893997 - DNA, 15 bp, Homo sapiens
acagccatgctggcc

SEQ ID NO: 1893998 - DNA, 15 bp, Homo sapiens
cagccatgctggccc

SEQ ID NO: 1893999 - DNA, 15 bp, Homo sapiens
agccatgctggccct

SEQ ID NO: 1894000 - DNA, 15 bp, Homo sapiens
gccatgctggccctc

SEQ ID NO: 1894001 - DNA, 15 bp, Homo sapiens
ccatgctggccctcc

SEQ ID NO: 1894002 - DNA, 15 bp, Homo sapiens
catgctggccctcct

SEQ ID NO: 1894003 - DNA, 15 bp, Homo sapiens
atgctggccctcctg

SEQ ID NO: 1894004 - DNA, 15 bp, Homo sapiens
tgctggccctcctga

SEQ ID NO: 1894005 - DNA, 15 bp, Homo sapiens
gctggccctcctgac

SEQ ID NO: 1894006 - DNA, 15 bp, Homo sapiens
ctggccctcctgaca

SEQ ID NO: 1894007 - DNA, 15 bp, Homo sapiens
tggccctcctgacac

SEQ ID NO: 1894008 - DNA, 15 bp, Homo sapiens
ggccctcctgacaca

SEQ ID NO: 1894009 - DNA, 15 bp, Homo sapiens
gccctcctgacacat

SEQ ID NO: 1894010 - DNA, 15 bp, Homo sapiens
ccctcctgacacatc

SEQ ID NO: 1894011 - DNA, 15 bp, Homo sapiens
cctcctgacacatca

SEQ ID NO: 1894012 - DNA, 15 bp, Homo sapiens
ctcctgacacatcag

SEQ ID NO: 1894013 - DNA, 15 bp, Homo sapiens
tcctgacacatcagt

SEQ ID NO: 1894014 - DNA, 15 bp, Homo sapiens
cctgacacatcagtt

SEQ ID NO: 1894015 - DNA, 15 bp, Homo sapiens
ctgacacatcagttc

SEQ ID NO: 1894016 - DNA, 15 bp, Homo sapiens
tgacacatcagttcc

SEQ ID NO: 1894017 - DNA, 15 bp, Homo sapiens
gacacatcagttccc

SEQ ID NO: 1894018 - DNA, 15 bp, Homo sapiens
acacatcagttcccg

SEQ ID NO: 1894019 - DNA, 15 bp, Homo sapiens
cacatcagttcccgg

SEQ ID NO: 1894020 - DNA, 15 bp, Homo sapiens
acatcagttcccgga

SEQ ID NO: 1894021 - DNA, 15 bp, Homo sapiens
catcagttcccggaa

SEQ ID NO: 1894022 - DNA, 15 bp, Homo sapiens
atcagttcccggaac

SEQ ID NO: 1894023 - DNA, 15 bp, Homo sapiens
tcagttcccggaact

SEQ ID NO: 1894024 - DNA, 15 bp, Homo sapiens
cagttcccggaactt

SEQ ID NO: 1894025 - DNA, 15 bp, Homo sapiens
agttcccggaactta

SEQ ID NO: 1894026 - DNA, 15 bp, Homo sapiens
gttcccggaacttat

SEQ ID NO: 1894027 - DNA, 15 bp, Homo sapiens
ttcccggaacttatg

SEQ ID NO: 1894028 - DNA, 15 bp, Homo sapiens
tcccggaacttatgg

SEQ ID NO: 1894029 - DNA, 15 bp, Homo sapiens
cccggaacttatggg

SEQ ID NO: 1894030 - DNA, 15 bp, Homo sapiens
ccggaacttatgggg

SEQ ID NO: 1894031 - DNA, 15 bp, Homo sapiens
cggaacttatggggg

SEQ ID NO: 1894032 - DNA, 15 bp, Homo sapiens
ggaacttatgggggt

SEQ ID NO: 1894033 - DNA, 15 bp, Homo sapiens
gaacttatgggggtc

SEQ ID NO: 1894034 - DNA, 15 bp, Homo sapiens
aacttatgggggtct

SEQ ID NO: 1894035 - DNA, 15 bp, Homo sapiens
acttatgggggtctt

SEQ ID NO: 1894036 - DNA, 15 bp, Homo sapiens
cttatgggggtcttc

SEQ ID NO: 1894037 - DNA, 15 bp, Homo sapiens
ttatgggggtcttcg

SEQ ID NO: 1894038 - DNA, 15 bp, Homo sapiens
tatgggggtcttcgc

SEQ ID NO: 1894039 - DNA, 15 bp, Homo sapiens
atgggggtcttcgca

SEQ ID NO: 1894040 - DNA, 15 bp, Homo sapiens
tgggggtcttcgcaa

SEQ ID NO: 1894041 - DNA, 15 bp, Homo sapiens
gggggtcttcgcaaa

SEQ ID NO: 1894042 - DNA, 15 bp, Homo sapiens
ggggtcttcgcaaaa

SEQ ID NO: 1894043 - DNA, 15 bp, Homo sapiens
gggtcttcgcaaaag

SEQ ID NO: 1894044 - DNA, 15 bp, Homo sapiens
ggtcttcgcaaaagc

SEQ ID NO: 1894045 - DNA, 15 bp, Homo sapiens
gtcttcgcaaaagct

SEQ ID NO: 1894046 - DNA, 15 bp, Homo sapiens
tcttcgcaaaagctg

SEQ ID NO: 1894047 - DNA, 15 bp, Homo sapiens
cttcgcaaaagctgt

SEQ ID NO: 1894048 - DNA, 15 bp, Homo sapiens
ttcgcaaaagctgtg

SEQ ID NO: 1894049 - DNA, 15 bp, Homo sapiens
tcgcaaaagctgtga

SEQ ID NO: 1894050 - DNA, 15 bp, Homo sapiens
cgcaaaagctgtgag

SEQ ID NO: 1894051 - DNA, 15 bp, Homo sapiens
gcaaaagctgtgagt

SEQ ID NO: 1894052 - DNA, 15 bp, Homo sapiens
caaaagctgtgagtg

SEQ ID NO: 1894053 - DNA, 15 bp, Homo sapiens
aaaagctgtgagtgt

SEQ ID NO: 1894054 - DNA, 15 bp, Homo sapiens
aaagctgtgagtgtt

SEQ ID NO: 1894055 - DNA, 15 bp, Homo sapiens
aagctgtgagtgttt

SEQ ID NO: 1894056 - DNA, 15 bp, Homo sapiens
agctgtgagtgtttg

SEQ ID NO: 1894057 - DNA, 15 bp, Homo sapiens
gctgtgagtgtttgc

SEQ ID NO: 1894058 - DNA, 15 bp, Homo sapiens
ctgtgagtgtttgcc

SEQ ID NO: 1894059 - DNA, 15 bp, Homo sapiens
tgtgagtgtttgcct

SEQ ID NO: 1894060 - DNA, 15 bp, Homo sapiens
gtgagtgtttgccta

SEQ ID NO: 1894061 - DNA, 15 bp, Homo sapiens
tgagtgtttgcctag

SEQ ID NO: 1894062 - DNA, 15 bp, Homo sapiens
gagtgtttgcctaga

SEQ ID NO: 1894063 - DNA, 15 bp, Homo sapiens
agtgtttgcctagag

SEQ ID NO: 1894064 - DNA, 15 bp, Homo sapiens
gtgtttgcctagagg

SEQ ID NO: 1894065 - DNA, 15 bp, Homo sapiens
tgtttgcctagaggg

SEQ ID NO: 1894066 - DNA, 15 bp, Homo sapiens
gtttgcctagaggga

SEQ ID NO: 1894067 - DNA, 15 bp, Homo sapiens
tttgcctagagggag

SEQ ID NO: 1894068 - DNA, 15 bp, Homo sapiens
ttgcctagagggagg

SEQ ID NO: 1894069 - DNA, 15 bp, Homo sapiens
tgcctagagggaggc

SEQ ID NO: 1894070 - DNA, 15 bp, Homo sapiens
gcctagagggaggcc

SEQ ID NO: 1894071 - DNA, 15 bp, Homo sapiens
cctagagggaggcct

SEQ ID NO: 1894072 - DNA, 15 bp, Homo sapiens
ctagagggaggcctt

SEQ ID NO: 1894073 - DNA, 15 bp, Homo sapiens
tagagggaggccttg

SEQ ID NO: 1894074 - DNA, 15 bp, Homo sapiens
agagggaggccttgg

SEQ ID NO: 1894075 - DNA, 15 bp, Homo sapiens
gagggaggccttggg

SEQ ID NO: 1894076 - DNA, 15 bp, Homo sapiens
agggaggccttgggg

SEQ ID NO: 1894077 - DNA, 15 bp, Homo sapiens
gggaggccttgggga

SEQ ID NO: 1894078 - DNA, 15 bp, Homo sapiens
ggaggccttggggaa

SEQ ID NO: 1894079 - DNA, 15 bp, Homo sapiens
gaggccttggggaat

SEQ ID NO: 1894080 - DNA, 15 bp, Homo sapiens
aggccttggggaatg

SEQ ID NO: 1894081 - DNA, 15 bp, Homo sapiens
ggccttggggaatgg

SEQ ID NO: 1894082 - DNA, 15 bp, Homo sapiens
gccttggggaatgga

SEQ ID NO: 1894083 - DNA, 15 bp, Homo sapiens
ccttggggaatggat

SEQ ID NO: 1894084 - DNA, 15 bp, Homo sapiens
cttggggaatggatg

SEQ ID NO: 1894085 - DNA, 15 bp, Homo sapiens
ttggggaatggatgg

SEQ ID NO: 1894086 - DNA, 15 bp, Homo sapiens
tggggaatggatggg

SEQ ID NO: 1894087 - DNA, 15 bp, Homo sapiens
ggggaatggatgggg

SEQ ID NO: 1894088 - DNA, 15 bp, Homo sapiens
gggaatggatgggga

SEQ ID NO: 1894089 - DNA, 15 bp, Homo sapiens
ggaatggatggggaa

SEQ ID NO: 1894090 - DNA, 15 bp, Homo sapiens
gaatggatggggaaa

SEQ ID NO: 1894091 - DNA, 15 bp, Homo sapiens
aatggatggggaaag

SEQ ID NO: 1894092 - DNA, 15 bp, Homo sapiens
atggatggggaaagc

SEQ ID NO: 1894093 - DNA, 15 bp, Homo sapiens
tggatggggaaagcc

SEQ ID NO: 1894094 - DNA, 15 bp, Homo sapiens
ggatggggaaagcca

SEQ ID NO: 1894095 - DNA, 15 bp, Homo sapiens
gatggggaaagccaa

SEQ ID NO: 1894096 - DNA, 15 bp, Homo sapiens
atggggaaagccaag

SEQ ID NO: 1894097 - DNA, 15 bp, Homo sapiens
tggggaaagccaagg

SEQ ID NO: 1894098 - DNA, 15 bp, Homo sapiens
ggggaaagccaaggg

SEQ ID NO: 1894099 - DNA, 15 bp, Homo sapiens
gggaaagccaagggc

SEQ ID NO: 1894100 - DNA, 15 bp, Homo sapiens
ggaaagccaagggca

SEQ ID NO: 1894101 - DNA, 15 bp, Homo sapiens
gaaagccaagggcat

SEQ ID NO: 1894102 - DNA, 15 bp, Homo sapiens
aaagccaagggcata

SEQ ID NO: 1894103 - DNA, 15 bp, Homo sapiens
aagccaagggcataa

SEQ ID NO: 1894104 - DNA, 15 bp, Homo sapiens
agccaagggcataaa

SEQ ID NO: 1894105 - DNA, 15 bp, Homo sapiens
gccaagggcataaaa

SEQ ID NO: 1894106 - DNA, 15 bp, Homo sapiens
ccaagggcataaaag

SEQ ID NO: 1894107 - DNA, 15 bp, Homo sapiens
caagggcataaaagc

SEQ ID NO: 1894108 - DNA, 15 bp, Homo sapiens
aagggcataaaagca

SEQ ID NO: 1894109 - DNA, 15 bp, Homo sapiens
agggcataaaagcag

SEQ ID NO: 1894110 - DNA, 15 bp, Homo sapiens
gggcataaaagcagc

SEQ ID NO: 1894111 - DNA, 15 bp, Homo sapiens
ggcataaaagcagcg

SEQ ID NO: 1894112 - DNA, 15 bp, Homo sapiens
gcataaaagcagcgt

SEQ ID NO: 1894113 - DNA, 15 bp, Homo sapiens
cataaaagcagcgtg

SEQ ID NO: 1894114 - DNA, 15 bp, Homo sapiens
ataaaagcagcgtga

SEQ ID NO: 1894115 - DNA, 15 bp, Homo sapiens
taaaagcagcgtgag

SEQ ID NO: 1894116 - DNA, 15 bp, Homo sapiens
aaaagcagcgtgaga

SEQ ID NO: 1894117 - DNA, 15 bp, Homo sapiens
aaagcagcgtgagag

SEQ ID NO: 1894118 - DNA, 15 bp, Homo sapiens
aagcagcgtgagaga

SEQ ID NO: 1894119 - DNA, 15 bp, Homo sapiens
agcagcgtgagagaa

SEQ ID NO: 1894120 - DNA, 15 bp, Homo sapiens
gcagcgtgagagaaa

SEQ ID NO: 1894121 - DNA, 15 bp, Homo sapiens
cagcgtgagagaaat

SEQ ID NO: 1894122 - DNA, 15 bp, Homo sapiens
agcgtgagagaaatg

SEQ ID NO: 1894123 - DNA, 15 bp, Homo sapiens
gcgtgagagaaatgg

SEQ ID NO: 1894124 - DNA, 15 bp, Homo sapiens
cgtgagagaaatggg

SEQ ID NO: 1894125 - DNA, 15 bp, Homo sapiens
gtgagagaaatgggg

SEQ ID NO: 1894126 - DNA, 15 bp, Homo sapiens
tgagagaaatggggt

SEQ ID NO: 1894127 - DNA, 15 bp, Homo sapiens
gagagaaatggggtt

SEQ ID NO: 1894128 - DNA, 15 bp, Homo sapiens
agagaaatggggttg

SEQ ID NO: 1894129 - DNA, 15 bp, Homo sapiens
gagaaatggggttgc

SEQ ID NO: 1894130 - DNA, 15 bp, Homo sapiens
agaaatggggttgcc

SEQ ID NO: 1894131 - DNA, 15 bp, Homo sapiens
gaaatggggttgcct

SEQ ID NO: 1894132 - DNA, 15 bp, Homo sapiens
aaatggggttgcctt

SEQ ID NO: 1894133 - DNA, 15 bp, Homo sapiens
aatggggttgcctta

SEQ ID NO: 1894134 - DNA, 15 bp, Homo sapiens
atggggttgccttac

SEQ ID NO: 1894135 - DNA, 15 bp, Homo sapiens
tggggttgccttaca

SEQ ID NO: 1894136 - DNA, 15 bp, Homo sapiens
ggggttgccttacag

SEQ ID NO: 1894137 - DNA, 15 bp, Homo sapiens
gggttgccttacaga

SEQ ID NO: 1894138 - DNA, 15 bp, Homo sapiens
ggttgccttacagaa

SEQ ID NO: 1894139 - DNA, 15 bp, Homo sapiens
gttgccttacagaaa

SEQ ID NO: 1894140 - DNA, 15 bp, Homo sapiens
ttgccttacagaaat

SEQ ID NO: 1894141 - DNA, 15 bp, Homo sapiens
tgccttacagaaatg

SEQ ID NO: 1894142 - DNA, 15 bp, Homo sapiens
gccttacagaaatgg

SEQ ID NO: 1894143 - DNA, 15 bp, Homo sapiens
ccttacagaaatggg

SEQ ID NO: 1894144 - DNA, 15 bp, Homo sapiens
cttacagaaatgggt

SEQ ID NO: 1894145 - DNA, 15 bp, Homo sapiens
ttacagaaatgggta

SEQ ID NO: 1894146 - DNA, 15 bp, Homo sapiens
tacagaaatgggtac

SEQ ID NO: 1894147 - DNA, 15 bp, Homo sapiens
acagaaatgggtacg

SEQ ID NO: 1894148 - DNA, 15 bp, Homo sapiens
cagaaatgggtacga

SEQ ID NO: 1894149 - DNA, 15 bp, Homo sapiens
agaaatgggtacgag

SEQ ID NO: 1894150 - DNA, 15 bp, Homo sapiens
gaaatgggtacgagc

SEQ ID NO: 1894151 - DNA, 15 bp, Homo sapiens
aaatgggtacgagcc

SEQ ID NO: 1894152 - DNA, 15 bp, Homo sapiens
aatgggtacgagcct

SEQ ID NO: 1894153 - DNA, 15 bp, Homo sapiens
atgggtacgagcctg

SEQ ID NO: 1894154 - DNA, 15 bp, Homo sapiens
tgggtacgagcctgc

SEQ ID NO: 1894155 - DNA, 15 bp, Homo sapiens
gggtacgagcctgca

SEQ ID NO: 1894156 - DNA, 15 bp, Homo sapiens
ggtacgagcctgcaa

SEQ ID NO: 1894157 - DNA, 15 bp, Homo sapiens
gtacgagcctgcaaa

SEQ ID NO: 1894158 - DNA, 15 bp, Homo sapiens
tacgagcctgcaaag

SEQ ID NO: 1894159 - DNA, 15 bp, Homo sapiens
acgagcctgcaaaga

SEQ ID NO: 1894160 - DNA, 15 bp, Homo sapiens
cgagcctgcaaagat

SEQ ID NO: 1894161 - DNA, 15 bp, Homo sapiens
gagcctgcaaagatc

SEQ ID NO: 1894162 - DNA, 15 bp, Homo sapiens
agcctgcaaagatca

SEQ ID NO: 1894163 - DNA, 15 bp, Homo sapiens
gcctgcaaagatcat

SEQ ID NO: 1894164 - DNA, 15 bp, Homo sapiens
cctgcaaagatcatt

SEQ ID NO: 1894165 - DNA, 15 bp, Homo sapiens
ctgcaaagatcattg

SEQ ID NO: 1894166 - DNA, 15 bp, Homo sapiens
tgcaaagatcattgc

SEQ ID NO: 1894167 - DNA, 15 bp, Homo sapiens
gcaaagatcattgct

SEQ ID NO: 1894168 - DNA, 15 bp, Homo sapiens
caaagatcattgctc

SEQ ID NO: 1894169 - DNA, 15 bp, Homo sapiens
aaagatcattgctca

SEQ ID NO: 1894170 - DNA, 15 bp, Homo sapiens
aagatcattgctcac

SEQ ID NO: 1894171 - DNA, 15 bp, Homo sapiens
agatcattgctcacc

SEQ ID NO: 1894172 - DNA, 15 bp, Homo sapiens
gatcattgctcacca

SEQ ID NO: 1894173 - DNA, 15 bp, Homo sapiens
atcattgctcaccat

SEQ ID NO: 1894174 - DNA, 15 bp, Homo sapiens
tcattgctcaccatt

SEQ ID NO: 1894175 - DNA, 15 bp, Homo sapiens
cattgctcaccattt

SEQ ID NO: 1894176 - DNA, 15 bp, Homo sapiens
attgctcaccattta

SEQ ID NO: 1894177 - DNA, 15 bp, Homo sapiens
ttgctcaccatttaa

SEQ ID NO: 1894178 - DNA, 15 bp, Homo sapiens
tgctcaccatttaat

SEQ ID NO: 1894179 - DNA, 15 bp, Homo sapiens
gctcaccatttaatt

SEQ ID NO: 1894180 - DNA, 15 bp, Homo sapiens
ctcaccatttaattt

SEQ ID NO: 1894181 - DNA, 15 bp, Homo sapiens
tcaccatttaatttt

SEQ ID NO: 1894182 - DNA, 15 bp, Homo sapiens
caccatttaattttc

SEQ ID NO: 1894183 - DNA, 15 bp, Homo sapiens
accatttaattttca

SEQ ID NO: 1894184 - DNA, 15 bp, Homo sapiens
ccatttaattttcat

SEQ ID NO: 1894185 - DNA, 15 bp, Homo sapiens
catttaattttcatg

SEQ ID NO: 1894186 - DNA, 15 bp, Homo sapiens
atttaattttcatga

SEQ ID NO: 1894187 - DNA, 15 bp, Homo sapiens
tttaattttcatgat

SEQ ID NO: 1894188 - DNA, 15 bp, Homo sapiens
ttaattttcatgatc

SEQ ID NO: 1894189 - DNA, 15 bp, Homo sapiens
taattttcatgatcg

SEQ ID NO: 1894190 - DNA, 15 bp, Homo sapiens
aattttcatgatcgt

SEQ ID NO: 1894191 - DNA, 15 bp, Homo sapiens
attttcatgatcgtc

SEQ ID NO: 1894192 - DNA, 15 bp, Homo sapiens
ttttcatgatcgtca

SEQ ID NO: 1894193 - DNA, 15 bp, Homo sapiens
tttcatgatcgtcaa

SEQ ID NO: 1894194 - DNA, 15 bp, Homo sapiens
ttcatgatcgtcaat

SEQ ID NO: 1894195 - DNA, 15 bp, Homo sapiens
tcatgatcgtcaatg

SEQ ID NO: 1894196 - DNA, 15 bp, Homo sapiens
catgatcgtcaatgg

SEQ ID NO: 1894197 - DNA, 15 bp, Homo sapiens
atgatcgtcaatgga

SEQ ID NO: 1894198 - DNA, 15 bp, Homo sapiens
tgatcgtcaatggaa

SEQ ID NO: 1894199 - DNA, 15 bp, Homo sapiens
gatcgtcaatggaat

SEQ ID NO: 1894200 - DNA, 15 bp, Homo sapiens
atcgtcaatggaatc

SEQ ID NO: 1894201 - DNA, 15 bp, Homo sapiens
tcgtcaatggaatca

SEQ ID NO: 1894202 - DNA, 15 bp, Homo sapiens
cgtcaatggaatcaa

SEQ ID NO: 1894203 - DNA, 15 bp, Homo sapiens
gtcaatggaatcaaa

SEQ ID NO: 1894204 - DNA, 15 bp, Homo sapiens
tcaatggaatcaaag

SEQ ID NO: 1894205 - DNA, 15 bp, Homo sapiens
caatggaatcaaagc

SEQ ID NO: 1894206 - DNA, 15 bp, Homo sapiens
aatggaatcaaagca

SEQ ID NO: 1894207 - DNA, 15 bp, Homo sapiens
atggaatcaaagcat

SEQ ID NO: 1894208 - DNA, 15 bp, Homo sapiens
tggaatcaaagcatt

SEQ ID NO: 1894209 - DNA, 15 bp, Homo sapiens
ggaatcaaagcatta

SEQ ID NO: 1894210 - DNA, 15 bp, Homo sapiens
gaatcaaagcattaa

SEQ ID NO: 1894211 - DNA, 15 bp, Homo sapiens
aatcaaagcattaag

SEQ ID NO: 1894212 - DNA, 15 bp, Homo sapiens
atcaaagcattaagg

SEQ ID NO: 1894213 - DNA, 15 bp, Homo sapiens
tcaaagcattaaggg

SEQ ID NO: 1894214 - DNA, 15 bp, Homo sapiens
caaagcattaagggt

SEQ ID NO: 1894215 - DNA, 15 bp, Homo sapiens
aaagcattaagggtc

SEQ ID NO: 1894216 - DNA, 15 bp, Homo sapiens
aagcattaagggtca

SEQ ID NO: 1894217 - DNA, 15 bp, Homo sapiens
agcattaagggtcaa

SEQ ID NO: 1894218 - DNA, 15 bp, Homo sapiens
gcattaagggtcaaa

SEQ ID NO: 1894219 - DNA, 15 bp, Homo sapiens
cattaagggtcaaat

SEQ ID NO: 1894220 - DNA, 15 bp, Homo sapiens
attaagggtcaaatg

SEQ ID NO: 1894221 - DNA, 15 bp, Homo sapiens
ttaagggtcaaatga

SEQ ID NO: 1894222 - DNA, 15 bp, Homo sapiens
taagggtcaaatgag

SEQ ID NO: 1894223 - DNA, 15 bp, Homo sapiens
aagggtcaaatgaga

SEQ ID NO: 1894224 - DNA, 15 bp, Homo sapiens
agggtcaaatgagaa

SEQ ID NO: 1894225 - DNA, 15 bp, Homo sapiens
gggtcaaatgagaaa

SEQ ID NO: 1894226 - DNA, 15 bp, Homo sapiens
ggtcaaatgagaaag

SEQ ID NO: 1894227 - DNA, 15 bp, Homo sapiens
gtcaaatgagaaagt

SEQ ID NO: 1894228 - DNA, 15 bp, Homo sapiens
tcaaatgagaaagtg

SEQ ID NO: 1894229 - DNA, 15 bp, Homo sapiens
caaatgagaaagtgc

SEQ ID NO: 1894230 - DNA, 15 bp, Homo sapiens
aaatgagaaagtgca

SEQ ID NO: 1894231 - DNA, 15 bp, Homo sapiens
aatgagaaagtgcag

SEQ ID NO: 1894232 - DNA, 15 bp, Homo sapiens
atgagaaagtgcagg

SEQ ID NO: 1894233 - DNA, 15 bp, Homo sapiens
tgagaaagtgcaggt

SEQ ID NO: 1894234 - DNA, 15 bp, Homo sapiens
gagaaagtgcaggtt

SEQ ID NO: 1894235 - DNA, 15 bp, Homo sapiens
agaaagtgcaggttg

SEQ ID NO: 1894236 - DNA, 15 bp, Homo sapiens
gaaagtgcaggttgt

SEQ ID NO: 1894237 - DNA, 15 bp, Homo sapiens
aaagtgcaggttgtt

SEQ ID NO: 1894238 - DNA, 15 bp, Homo sapiens
aagtgcaggttgtta

SEQ ID NO: 1894239 - DNA, 15 bp, Homo sapiens
agtgcaggttgttac

SEQ ID NO: 1894240 - DNA, 15 bp, Homo sapiens
gtgcaggttgttact

SEQ ID NO: 1894241 - DNA, 15 bp, Homo sapiens
tgcaggttgttactg

SEQ ID NO: 1894242 - DNA, 15 bp, Homo sapiens
gcaggttgttactgc

SEQ ID NO: 1894243 - DNA, 15 bp, Homo sapiens
caggttgttactgca

SEQ ID NO: 1894244 - DNA, 15 bp, Homo sapiens
aggttgttactgcat

SEQ ID NO: 1894245 - DNA, 15 bp, Homo sapiens
ggttgttactgcatg

SEQ ID NO: 1894246 - DNA, 15 bp, Homo sapiens
gttgttactgcatgc

SEQ ID NO: 1894247 - DNA, 15 bp, Homo sapiens
ttgttactgcatgcc

SEQ ID NO: 1894248 - DNA, 15 bp, Homo sapiens
tgttactgcatgcct

SEQ ID NO: 1894249 - DNA, 15 bp, Homo sapiens
gttactgcatgcctt

SEQ ID NO: 1894250 - DNA, 15 bp, Homo sapiens
ttactgcatgccttg

SEQ ID NO: 1894251 - DNA, 15 bp, Homo sapiens
tactgcatgccttgc

SEQ ID NO: 1894252 - DNA, 15 bp, Homo sapiens
actgcatgccttgcc

SEQ ID NO: 1894253 - DNA, 15 bp, Homo sapiens
ctgcatgccttgcct

SEQ ID NO: 1894254 - DNA, 15 bp, Homo sapiens
tgcatgccttgcctc

SEQ ID NO: 1894255 - DNA, 15 bp, Homo sapiens
gcatgccttgcctca

SEQ ID NO: 1894256 - DNA, 15 bp, Homo sapiens
catgccttgcctcat

SEQ ID NO: 1894257 - DNA, 15 bp, Homo sapiens
atgccttgcctcatt

SEQ ID NO: 1894258 - DNA, 15 bp, Homo sapiens
tgccttgcctcattt

SEQ ID NO: 1894259 - DNA, 15 bp, Homo sapiens
gccttgcctcatttc

SEQ ID NO: 1894260 - DNA, 15 bp, Homo sapiens
ccttgcctcatttca

SEQ ID NO: 1894261 - DNA, 15 bp, Homo sapiens
cttgcctcatttcac

SEQ ID NO: 1894262 - DNA, 15 bp, Homo sapiens
ttgcctcatttcaca

SEQ ID NO: 1894263 - DNA, 15 bp, Homo sapiens
tgcctcatttcacaa

SEQ ID NO: 1894264 - DNA, 15 bp, Homo sapiens
gcctcatttcacaac

SEQ ID NO: 1894265 - DNA, 15 bp, Homo sapiens
cctcatttcacaaca

SEQ ID NO: 1894266 - DNA, 15 bp, Homo sapiens
ctcatttcacaacaa

SEQ ID NO: 1894267 - DNA, 15 bp, Homo sapiens
tcatttcacaacaaa

SEQ ID NO: 1894268 - DNA, 15 bp, Homo sapiens
catttcacaacaaat

SEQ ID NO: 1894269 - DNA, 15 bp, Homo sapiens
atttcacaacaaatt

SEQ ID NO: 1894270 - DNA, 15 bp, Homo sapiens
tttcacaacaaattc

SEQ ID NO: 1894271 - DNA, 15 bp, Homo sapiens
ttcacaacaaattct

SEQ ID NO: 1894272 - DNA, 15 bp, Homo sapiens
tcacaacaaattctt

SEQ ID NO: 1894273 - DNA, 15 bp, Homo sapiens
cacaacaaattctta

SEQ ID NO: 1894274 - DNA, 15 bp, Homo sapiens
acaacaaattcttag

SEQ ID NO: 1894275 - DNA, 15 bp, Homo sapiens
caacaaattcttagc

SEQ ID NO: 1894276 - DNA, 15 bp, Homo sapiens
aacaaattcttagca

SEQ ID NO: 1894277 - DNA, 15 bp, Homo sapiens
acaaattcttagcag

SEQ ID NO: 1894278 - DNA, 15 bp, Homo sapiens
caaattcttagcagt

SEQ ID NO: 1894279 - DNA, 15 bp, Homo sapiens
aaattcttagcagtt

SEQ ID NO: 1894280 - DNA, 15 bp, Homo sapiens
aattcttagcagttt

SEQ ID NO: 1894281 - DNA, 15 bp, Homo sapiens
attcttagcagtttc

SEQ ID NO: 1894282 - DNA, 15 bp, Homo sapiens
ttcttagcagtttcc

SEQ ID NO: 1894283 - DNA, 15 bp, Homo sapiens
tcttagcagtttcca

SEQ ID NO: 1894284 - DNA, 15 bp, Homo sapiens
cttagcagtttccaa

SEQ ID NO: 1894285 - DNA, 15 bp, Homo sapiens
ttagcagtttccaaa

SEQ ID NO: 1894286 - DNA, 15 bp, Homo sapiens
tagcagtttccaaaa

SEQ ID NO: 1894287 - DNA, 15 bp, Homo sapiens
agcagtttccaaaaa

SEQ ID NO: 1894288 - DNA, 15 bp, Homo sapiens
gcagtttccaaaaaa

SEQ ID NO: 1894289 - DNA, 15 bp, Homo sapiens
cagtttccaaaaaat

SEQ ID NO: 1894290 - DNA, 15 bp, Homo sapiens
agtttccaaaaaatg

SEQ ID NO: 1894291 - DNA, 15 bp, Homo sapiens
gtttccaaaaaatgc

SEQ ID NO: 1894292 - DNA, 15 bp, Homo sapiens
tttccaaaaaatgca

SEQ ID NO: 1894293 - DNA, 15 bp, Homo sapiens
ttccaaaaaatgcag

SEQ ID NO: 1894294 - DNA, 15 bp, Homo sapiens
tccaaaaaatgcagg

SEQ ID NO: 1894295 - DNA, 15 bp, Homo sapiens
ccaaaaaatgcagga

SEQ ID NO: 1894296 - DNA, 15 bp, Homo sapiens
caaaaaatgcaggag

SEQ ID NO: 1894297 - DNA, 15 bp, Homo sapiens
aaaaaatgcaggagg

SEQ ID NO: 1894298 - DNA, 15 bp, Homo sapiens
aaaaatgcaggaggt

SEQ ID NO: 1894299 - DNA, 15 bp, Homo sapiens
aaaatgcaggaggtc

SEQ ID NO: 1894300 - DNA, 15 bp, Homo sapiens
aaatgcaggaggtcc

SEQ ID NO: 1894301 - DNA, 15 bp, Homo sapiens
aatgcaggaggtcca

SEQ ID NO: 1894302 - DNA, 15 bp, Homo sapiens
atgcaggaggtccaa

SEQ ID NO: 1894303 - DNA, 15 bp, Homo sapiens
tgcaggaggtccaaa

SEQ ID NO: 1894304 - DNA, 15 bp, Homo sapiens
gcaggaggtccaaaa

SEQ ID NO: 1894305 - DNA, 15 bp, Homo sapiens
caggaggtccaaaag

SEQ ID NO: 1894306 - DNA, 15 bp, Homo sapiens
aggaggtccaaaagg

SEQ ID NO: 1894307 - DNA, 15 bp, Homo sapiens
ggaggtccaaaagga

SEQ ID NO: 1894308 - DNA, 15 bp, Homo sapiens
gaggtccaaaaggat

SEQ ID NO: 1894309 - DNA, 15 bp, Homo sapiens
aggtccaaaaggatg

SEQ ID NO: 1894310 - DNA, 15 bp, Homo sapiens
ggtccaaaaggatgg

SEQ ID NO: 1894311 - DNA, 15 bp, Homo sapiens
gtccaaaaggatgga

SEQ ID NO: 1894312 - DNA, 15 bp, Homo sapiens
tccaaaaggatggaa

SEQ ID NO: 1894313 - DNA, 15 bp, Homo sapiens
ccaaaaggatggaat

SEQ ID NO: 1894314 - DNA, 15 bp, Homo sapiens
caaaaggatggaatg

SEQ ID NO: 1894315 - DNA, 15 bp, Homo sapiens
aaaaggatggaatga

SEQ ID NO: 1894316 - DNA, 15 bp, Homo sapiens
aaaggatggaatgat

SEQ ID NO: 1894317 - DNA, 15 bp, Homo sapiens
aaggatggaatgatt

SEQ ID NO: 1894318 - DNA, 15 bp, Homo sapiens
aggatggaatgattt

SEQ ID NO: 1894319 - DNA, 15 bp, Homo sapiens
ggatggaatgattta

SEQ ID NO: 1894320 - DNA, 15 bp, Homo sapiens
gatggaatgatttag

SEQ ID NO: 1894321 - DNA, 15 bp, Homo sapiens
atggaatgatttagg

SEQ ID NO: 1894322 - DNA, 15 bp, Homo sapiens
tggaatgatttagga

SEQ ID NO: 1894323 - DNA, 15 bp, Homo sapiens
ggaatgatttaggaa

SEQ ID NO: 1894324 - DNA, 15 bp, Homo sapiens
gaatgatttaggaaa

SEQ ID NO: 1894325 - DNA, 15 bp, Homo sapiens
aatgatttaggaaat

SEQ ID NO: 1894326 - DNA, 15 bp, Homo sapiens
atgatttaggaaatc

SEQ ID NO: 1894327 - DNA, 15 bp, Homo sapiens
tgatttaggaaatcc

SEQ ID NO: 1894328 - DNA, 15 bp, Homo sapiens
gatttaggaaatcct

SEQ ID NO: 1894329 - DNA, 15 bp, Homo sapiens
atttaggaaatccta

SEQ ID NO: 1894330 - DNA, 15 bp, Homo sapiens
tttaggaaatcctag

SEQ ID NO: 1894331 - DNA, 15 bp, Homo sapiens
ttaggaaatcctagc

SEQ ID NO: 1894332 - DNA, 15 bp, Homo sapiens
taggaaatcctagca

SEQ ID NO: 1894333 - DNA, 15 bp, Homo sapiens
aggaaatcctagcaa

SEQ ID NO: 1894334 - DNA, 15 bp, Homo sapiens
ggaaatcctagcaaa

SEQ ID NO: 1894335 - DNA, 15 bp, Homo sapiens
gaaatcctagcaaat

SEQ ID NO: 1894336 - DNA, 15 bp, Homo sapiens
aaatcctagcaaatg

SEQ ID NO: 1894337 - DNA, 15 bp, Homo sapiens
aatcctagcaaatga

SEQ ID NO: 1894338 - DNA, 15 bp, Homo sapiens
atcctagcaaatgaa

SEQ ID NO: 1894339 - DNA, 15 bp, Homo sapiens
tcctagcaaatgaaa

SEQ ID NO: 1894340 - DNA, 15 bp, Homo sapiens
cctagcaaatgaaaa

SEQ ID NO: 1894341 - DNA, 15 bp, Homo sapiens
ctagcaaatgaaaat

SEQ ID NO: 1894342 - DNA, 15 bp, Homo sapiens
tagcaaatgaaaatg

SEQ ID NO: 1894343 - DNA, 15 bp, Homo sapiens
agcaaatgaaaatgt

SEQ ID NO: 1894344 - DNA, 15 bp, Homo sapiens
gcaaatgaaaatgtg

SEQ ID NO: 1894345 - DNA, 15 bp, Homo sapiens
caaatgaaaatgtgt

SEQ ID NO: 1894346 - DNA, 15 bp, Homo sapiens
aaatgaaaatgtgtg

SEQ ID NO: 1894347 - DNA, 15 bp, Homo sapiens
aatgaaaatgtgtgg

SEQ ID NO: 1894348 - DNA, 15 bp, Homo sapiens
atgaaaatgtgtggg

SEQ ID NO: 1894349 - DNA, 15 bp, Homo sapiens
tgaaaatgtgtggga

SEQ ID NO: 1894350 - DNA, 15 bp, Homo sapiens
gaaaatgtgtgggaa

SEQ ID NO: 1894351 - DNA, 15 bp, Homo sapiens
aaaatgtgtgggaag

SEQ ID NO: 1894352 - DNA, 15 bp, Homo sapiens
aaatgtgtgggaagt

SEQ ID NO: 1894353 - DNA, 15 bp, Homo sapiens
aatgtgtgggaagtt

SEQ ID NO: 1894354 - DNA, 15 bp, Homo sapiens
atgtgtgggaagtta

SEQ ID NO: 1894355 - DNA, 15 bp, Homo sapiens
tgtgtgggaagttac

SEQ ID NO: 1894356 - DNA, 15 bp, Homo sapiens
gtgtgggaagttact

SEQ ID NO: 1894357 - DNA, 15 bp, Homo sapiens
tgtgggaagttactc

SEQ ID NO: 1894358 - DNA, 15 bp, Homo sapiens
gtgggaagttactcg

SEQ ID NO: 1894359 - DNA, 15 bp, Homo sapiens
tgggaagttactcgg

SEQ ID NO: 1894360 - DNA, 15 bp, Homo sapiens
gggaagttactcggt

SEQ ID NO: 1894361 - DNA, 15 bp, Homo sapiens
ggaagttactcggtt

SEQ ID NO: 1894362 - DNA, 15 bp, Homo sapiens
gaagttactcggttt

SEQ ID NO: 1894363 - DNA, 15 bp, Homo sapiens
aagttactcggtttt

SEQ ID NO: 1894364 - DNA, 15 bp, Homo sapiens
agttactcggttttc

SEQ ID NO: 1894365 - DNA, 15 bp, Homo sapiens
gttactcggttttct

SEQ ID NO: 1894366 - DNA, 15 bp, Homo sapiens
ttactcggttttctg

SEQ ID NO: 1894367 - DNA, 15 bp, Homo sapiens
tactcggttttctgt

SEQ ID NO: 1894368 - DNA, 15 bp, Homo sapiens
actcggttttctgta

SEQ ID NO: 1894369 - DNA, 15 bp, Homo sapiens
ctcggttttctgtaa

SEQ ID NO: 1894370 - DNA, 15 bp, Homo sapiens
tcggttttctgtaaa

SEQ ID NO: 1894371 - DNA, 15 bp, Homo sapiens
cggttttctgtaaat

SEQ ID NO: 1894372 - DNA, 15 bp, Homo sapiens
ggttttctgtaaatt

SEQ ID NO: 1894373 - DNA, 15 bp, Homo sapiens
gttttctgtaaattg

SEQ ID NO: 1894374 - DNA, 15 bp, Homo sapiens
ttttctgtaaattga

SEQ ID NO: 1894375 - DNA, 15 bp, Homo sapiens
tttctgtaaattgaa

SEQ ID NO: 1894376 - DNA, 15 bp, Homo sapiens
ttctgtaaattgaat

SEQ ID NO: 1894377 - DNA, 15 bp, Homo sapiens
tctgtaaattgaatg

SEQ ID NO: 1894378 - DNA, 15 bp, Homo sapiens
ctgtaaattgaatga

SEQ ID NO: 1894379 - DNA, 15 bp, Homo sapiens
tgtaaattgaatgac

SEQ ID NO: 1894380 - DNA, 15 bp, Homo sapiens
gtaaattgaatgaca

SEQ ID NO: 1894381 - DNA, 15 bp, Homo sapiens
taaattgaatgacat

SEQ ID NO: 1894382 - DNA, 15 bp, Homo sapiens
aaattgaatgacatt

SEQ ID NO: 1894383 - DNA, 15 bp, Homo sapiens
aattgaatgacatta

SEQ ID NO: 1894384 - DNA, 15 bp, Homo sapiens
attgaatgacattat

SEQ ID NO: 1894385 - DNA, 15 bp, Homo sapiens
ttgaatgacattatt

SEQ ID NO: 1894386 - DNA, 15 bp, Homo sapiens
tgaatgacattattt

SEQ ID NO: 1894387 - DNA, 15 bp, Homo sapiens
gaatgacattatttc

SEQ ID NO: 1894388 - DNA, 15 bp, Homo sapiens
aatgacattatttcc

SEQ ID NO: 1894389 - DNA, 15 bp, Homo sapiens
atgacattatttcca

SEQ ID NO: 1894390 - DNA, 15 bp, Homo sapiens
tgacattatttccaa

SEQ ID NO: 1894391 - DNA, 15 bp, Homo sapiens
gacattatttccaat

SEQ ID NO: 1894392 - DNA, 15 bp, Homo sapiens
acattatttccaatc

SEQ ID NO: 1894393 - DNA, 15 bp, Homo sapiens
cattatttccaatcg

SEQ ID NO: 1894394 - DNA, 15 bp, Homo sapiens
attatttccaatcgt

SEQ ID NO: 1894395 - DNA, 15 bp, Homo sapiens
ttatttccaatcgtt

SEQ ID NO: 1894396 - DNA, 15 bp, Homo sapiens
tatttccaatcgttg

SEQ ID NO: 1894397 - DNA, 15 bp, Homo sapiens
atttccaatcgttgg

SEQ ID NO: 1894398 - DNA, 15 bp, Homo sapiens
tttccaatcgttgga

SEQ ID NO: 1894399 - DNA, 15 bp, Homo sapiens
ttccaatcgttggat

SEQ ID NO: 1894400 - DNA, 15 bp, Homo sapiens
tccaatcgttggata

SEQ ID NO: 1894401 - DNA, 15 bp, Homo sapiens
ccaatcgttggatat

SEQ ID NO: 1894402 - DNA, 15 bp, Homo sapiens
caatcgttggatatt

SEQ ID NO: 1894403 - DNA, 15 bp, Homo sapiens
aatcgttggatattg

SEQ ID NO: 1894404 - DNA, 15 bp, Homo sapiens
atcgttggatattgt

SEQ ID NO: 1894405 - DNA, 15 bp, Homo sapiens
tcgttggatattgtg

SEQ ID NO: 1894406 - DNA, 15 bp, Homo sapiens
cgttggatattgtgg

SEQ ID NO: 1894407 - DNA, 15 bp, Homo sapiens
gttggatattgtggg

SEQ ID NO: 1894408 - DNA, 15 bp, Homo sapiens
ttggatattgtgggt

SEQ ID NO: 1894409 - DNA, 15 bp, Homo sapiens
tggatattgtgggtc

SEQ ID NO: 1894410 - DNA, 15 bp, Homo sapiens
ggatattgtgggtct

SEQ ID NO: 1894411 - DNA, 15 bp, Homo sapiens
gatattgtgggtctt

SEQ ID NO: 1894412 - DNA, 15 bp, Homo sapiens
atattgtgggtcttt

SEQ ID NO: 1894413 - DNA, 15 bp, Homo sapiens
tattgtgggtctttc

SEQ ID NO: 1894414 - DNA, 15 bp, Homo sapiens
attgtgggtctttcc

SEQ ID NO: 1894415 - DNA, 15 bp, Homo sapiens
ttgtgggtctttcct

SEQ ID NO: 1894416 - DNA, 15 bp, Homo sapiens
tgtgggtctttcctt

SEQ ID NO: 1894417 - DNA, 15 bp, Homo sapiens
gtgggtctttcctta

SEQ ID NO: 1894418 - DNA, 15 bp, Homo sapiens
tgggtctttccttag

SEQ ID NO: 1894419 - DNA, 15 bp, Homo sapiens
gggtctttccttagt

SEQ ID NO: 1894420 - DNA, 15 bp, Homo sapiens
ggtctttccttagtg

SEQ ID NO: 1894421 - DNA, 15 bp, Homo sapiens
gtctttccttagtga

SEQ ID NO: 1894422 - DNA, 15 bp, Homo sapiens
tctttccttagtgaa

SEQ ID NO: 1894423 - DNA, 15 bp, Homo sapiens
ctttccttagtgaag

SEQ ID NO: 1894424 - DNA, 15 bp, Homo sapiens
tttccttagtgaagg

SEQ ID NO: 1894425 - DNA, 15 bp, Homo sapiens
ttccttagtgaagga

SEQ ID NO: 1894426 - DNA, 15 bp, Homo sapiens
tccttagtgaaggat

SEQ ID NO: 1894427 - DNA, 15 bp, Homo sapiens
ccttagtgaaggatg

SEQ ID NO: 1894428 - DNA, 15 bp, Homo sapiens
cttagtgaaggatga

SEQ ID NO: 1894429 - DNA, 15 bp, Homo sapiens
ttagtgaaggatgag

SEQ ID NO: 1894430 - DNA, 15 bp, Homo sapiens
tagtgaaggatgaga

SEQ ID NO: 1894431 - DNA, 15 bp, Homo sapiens
agtgaaggatgagat

SEQ ID NO: 1894432 - DNA, 15 bp, Homo sapiens
gtgaaggatgagatt

SEQ ID NO: 1894433 - DNA, 15 bp, Homo sapiens
tgaaggatgagattt

SEQ ID NO: 1894434 - DNA, 15 bp, Homo sapiens
gaaggatgagattta

SEQ ID NO: 1894435 - DNA, 15 bp, Homo sapiens
aaggatgagatttac

SEQ ID NO: 1894436 - DNA, 15 bp, Homo sapiens
aggatgagatttaca

SEQ ID NO: 1894437 - DNA, 15 bp, Homo sapiens
ggatgagatttacat

SEQ ID NO: 1894438 - DNA, 15 bp, Homo sapiens
gatgagatttacatt

SEQ ID NO: 1894439 - DNA, 15 bp, Homo sapiens
atgagatttacattt

SEQ ID NO: 1894440 - DNA, 15 bp, Homo sapiens
tgagatttacatttt

SEQ ID NO: 1894441 - DNA, 15 bp, Homo sapiens
gagatttacattttc

SEQ ID NO: 1894442 - DNA, 15 bp, Homo sapiens
agatttacattttca

SEQ ID NO: 1894443 - DNA, 15 bp, Homo sapiens
gatttacattttcaa

SEQ ID NO: 1894444 - DNA, 15 bp, Homo sapiens
atttacattttcaaa

SEQ ID NO: 1894445 - DNA, 15 bp, Homo sapiens
tttacattttcaaag

SEQ ID NO: 1894446 - DNA, 15 bp, Homo sapiens
ttacattttcaaaga

SEQ ID NO: 1894447 - DNA, 15 bp, Homo sapiens
tacattttcaaagat

SEQ ID NO: 1894448 - DNA, 15 bp, Homo sapiens
acattttcaaagatg

SEQ ID NO: 1894449 - DNA, 15 bp, Homo sapiens
cattttcaaagatga

SEQ ID NO: 1894450 - DNA, 15 bp, Homo sapiens
attttcaaagatgat

SEQ ID NO: 1894451 - DNA, 15 bp, Homo sapiens
ttttcaaagatgatt

SEQ ID NO: 1894452 - DNA, 15 bp, Homo sapiens
tttcaaagatgattt

SEQ ID NO: 1894453 - DNA, 15 bp, Homo sapiens
ttcaaagatgattta

SEQ ID NO: 1894454 - DNA, 15 bp, Homo sapiens
tcaaagatgatttaa

SEQ ID NO: 1894455 - DNA, 15 bp, Homo sapiens
caaagatgatttaaa

SEQ ID NO: 1894456 - DNA, 15 bp, Homo sapiens
aaagatgatttaaat

SEQ ID NO: 1894457 - DNA, 15 bp, Homo sapiens
aagatgatttaaata

SEQ ID NO: 1894458 - DNA, 15 bp, Homo sapiens
agatgatttaaataa

SEQ ID NO: 1894459 - DNA, 15 bp, Homo sapiens
gatgatttaaataat

SEQ ID NO: 1894460 - DNA, 15 bp, Homo sapiens
atgatttaaataatt

SEQ ID NO: 1894461 - DNA, 15 bp, Homo sapiens
tgatttaaataattt

SEQ ID NO: 1894462 - DNA, 15 bp, Homo sapiens
gatttaaataatttt

SEQ ID NO: 1894463 - DNA, 15 bp, Homo sapiens
atttaaataattttt

SEQ ID NO: 1894464 - DNA, 15 bp, Homo sapiens
tttaaataatttttt

SEQ ID NO: 1894465 - DNA, 15 bp, Homo sapiens
ttaaataattttttt

SEQ ID NO: 1894466 - DNA, 15 bp, Homo sapiens
taaataatttttttt

SEQ ID NO: 1894467 - DNA, 15 bp, Homo sapiens
aaataatttttttta

SEQ ID NO: 1894468 - DNA, 15 bp, Homo sapiens
aataattttttttaa

SEQ ID NO: 1894469 - DNA, 15 bp, Homo sapiens
taattttttttaatg

SEQ ID NO: 1894470 - DNA, 15 bp, Homo sapiens
aattttttttaatgg

SEQ ID NO: 1894471 - DNA, 15 bp, Homo sapiens
attttttttaatggc

SEQ ID NO: 1894472 - DNA, 15 bp, Homo sapiens
ttttttttaatggct

SEQ ID NO: 1894473 - DNA, 15 bp, Homo sapiens
tttttttaatggctg

SEQ ID NO: 1894474 - DNA, 15 bp, Homo sapiens
ttttttaatggctgc

SEQ ID NO: 1894475 - DNA, 15 bp, Homo sapiens
ttttaatggctgcaa

SEQ ID NO: 1894476 - DNA, 15 bp, Homo sapiens
tttaatggctgcaaa

SEQ ID NO: 1894477 - DNA, 15 bp, Homo sapiens
ttaatggctgcaaac

SEQ ID NO: 1894478 - DNA, 15 bp, Homo sapiens
taatggctgcaaacc

SEQ ID NO: 1894479 - DNA, 15 bp, Homo sapiens
aatggctgcaaaccc

SEQ ID NO: 1894480 - DNA, 15 bp, Homo sapiens
atggctgcaaaccct

SEQ ID NO: 1894481 - DNA, 15 bp, Homo sapiens
tggctgcaaaccctt

SEQ ID NO: 1894482 - DNA, 15 bp, Homo sapiens
ggctgcaaacccttg

SEQ ID NO: 1894483 - DNA, 15 bp, Homo sapiens
gctgcaaacccttgg

SEQ ID NO: 1894484 - DNA, 15 bp, Homo sapiens
ctgcaaacccttggc

SEQ ID NO: 1894485 - DNA, 15 bp, Homo sapiens
tgcaaacccttggct

SEQ ID NO: 1894486 - DNA, 15 bp, Homo sapiens
gcaaacccttggctt

SEQ ID NO: 1894487 - DNA, 15 bp, Homo sapiens
caaacccttggcttg

SEQ ID NO: 1894488 - DNA, 15 bp, Homo sapiens
aaacccttggcttgt

SEQ ID NO: 1894489 - DNA, 15 bp, Homo sapiens
aacccttggcttgtc

SEQ ID NO: 1894490 - DNA, 15 bp, Homo sapiens
acccttggcttgtct

SEQ ID NO: 1894491 - DNA, 15 bp, Homo sapiens
cccttggcttgtcta

SEQ ID NO: 1894492 - DNA, 15 bp, Homo sapiens
ccttggcttgtctaa

SEQ ID NO: 1894493 - DNA, 15 bp, Homo sapiens
cttggcttgtctaag

SEQ ID NO: 1894494 - DNA, 15 bp, Homo sapiens
ttggcttgtctaagg

SEQ ID NO: 1894495 - DNA, 15 bp, Homo sapiens
tggcttgtctaagga

SEQ ID NO: 1894496 - DNA, 15 bp, Homo sapiens
ggcttgtctaaggaa

SEQ ID NO: 1894497 - DNA, 15 bp, Homo sapiens
gcttgtctaaggaat

SEQ ID NO: 1894498 - DNA, 15 bp, Homo sapiens
cttgtctaaggaatg

SEQ ID NO: 1894499 - DNA, 15 bp, Homo sapiens
ttgtctaaggaatga

SEQ ID NO: 1894500 - DNA, 15 bp, Homo sapiens
tgtctaaggaatgaa

SEQ ID NO: 1894501 - DNA, 15 bp, Homo sapiens
gtctaaggaatgaac

SEQ ID NO: 1894502 - DNA, 15 bp, Homo sapiens
tctaaggaatgaaca

SEQ ID NO: 1894503 - DNA, 15 bp, Homo sapiens
ctaaggaatgaacag

SEQ ID NO: 1894504 - DNA, 15 bp, Homo sapiens
taaggaatgaacaga

SEQ ID NO: 1894505 - DNA, 15 bp, Homo sapiens
aaggaatgaacagag

SEQ ID NO: 1894506 - DNA, 15 bp, Homo sapiens
aggaatgaacagagg

SEQ ID NO: 1894507 - DNA, 15 bp, Homo sapiens
ggaatgaacagaggg

SEQ ID NO: 1894508 - DNA, 15 bp, Homo sapiens
gaatgaacagagggt

SEQ ID NO: 1894509 - DNA, 15 bp, Homo sapiens
aatgaacagagggtg

SEQ ID NO: 1894510 - DNA, 15 bp, Homo sapiens
atgaacagagggtgt

SEQ ID NO: 1894511 - DNA, 15 bp, Homo sapiens
tgaacagagggtgta

SEQ ID NO: 1894512 - DNA, 15 bp, Homo sapiens
gaacagagggtgtaa

SEQ ID NO: 1894513 - DNA, 15 bp, Homo sapiens
aacagagggtgtaaa

SEQ ID NO: 1894514 - DNA, 15 bp, Homo sapiens
acagagggtgtaaag

SEQ ID NO: 1894515 - DNA, 15 bp, Homo sapiens
cagagggtgtaaagg

SEQ ID NO: 1894516 - DNA, 15 bp, Homo sapiens
agagggtgtaaaggg

SEQ ID NO: 1894517 - DNA, 15 bp, Homo sapiens
gagggtgtaaagggc

SEQ ID NO: 1894518 - DNA, 15 bp, Homo sapiens
agggtgtaaagggct

SEQ ID NO: 1894519 - DNA, 15 bp, Homo sapiens
gggtgtaaagggctt

SEQ ID NO: 1894520 - DNA, 15 bp, Homo sapiens
ggtgtaaagggctta

SEQ ID NO: 1894521 - DNA, 15 bp, Homo sapiens
gtgtaaagggcttat

SEQ ID NO: 1894522 - DNA, 15 bp, Homo sapiens
tgtaaagggcttatt

SEQ ID NO: 1894523 - DNA, 15 bp, Homo sapiens
gtaaagggcttatta

SEQ ID NO: 1894524 - DNA, 15 bp, Homo sapiens
taaagggcttattaa

SEQ ID NO: 1894525 - DNA, 15 bp, Homo sapiens
aaagggcttattaag

SEQ ID NO: 1894526 - DNA, 15 bp, Homo sapiens
aagggcttattaaga

SEQ ID NO: 1894527 - DNA, 15 bp, Homo sapiens
agggcttattaagaa

SEQ ID NO: 1894528 - DNA, 15 bp, Homo sapiens
gggcttattaagaag

SEQ ID NO: 1894529 - DNA, 15 bp, Homo sapiens
ggcttattaagaagt

SEQ ID NO: 1894530 - DNA, 15 bp, Homo sapiens
gcttattaagaagta

SEQ ID NO: 1894531 - DNA, 15 bp, Homo sapiens
cttattaagaagtaa

SEQ ID NO: 1894532 - DNA, 15 bp, Homo sapiens
ttattaagaagtaaa

SEQ ID NO: 1894533 - DNA, 15 bp, Homo sapiens
tattaagaagtaaac

SEQ ID NO: 1894534 - DNA, 15 bp, Homo sapiens
attaagaagtaaact

SEQ ID NO: 1894535 - DNA, 15 bp, Homo sapiens
ttaagaagtaaactg

SEQ ID NO: 1894536 - DNA, 15 bp, Homo sapiens
taagaagtaaactga

SEQ ID NO: 1894537 - DNA, 15 bp, Homo sapiens
aagaagtaaactgaa

SEQ ID NO: 1894538 - DNA, 15 bp, Homo sapiens
agaagtaaactgaaa

SEQ ID NO: 1894539 - DNA, 15 bp, Homo sapiens
gaagtaaactgaaat

SEQ ID NO: 1894540 - DNA, 15 bp, Homo sapiens
aagtaaactgaaatg

SEQ ID NO: 1894541 - DNA, 15 bp, Homo sapiens
agtaaactgaaatga

SEQ ID NO: 1894542 - DNA, 15 bp, Homo sapiens
gtaaactgaaatgac

SEQ ID NO: 1894543 - DNA, 15 bp, Homo sapiens
taaactgaaatgaca

SEQ ID NO: 1894544 - DNA, 15 bp, Homo sapiens
aaactgaaatgacat

SEQ ID NO: 1894545 - DNA, 15 bp, Homo sapiens
aactgaaatgacatt

SEQ ID NO: 1894546 - DNA, 15 bp, Homo sapiens
actgaaatgacattt

SEQ ID NO: 1894547 - DNA, 15 bp, Homo sapiens
ctgaaatgacattta

SEQ ID NO: 1894548 - DNA, 15 bp, Homo sapiens
tgaaatgacatttag

SEQ ID NO: 1894549 - DNA, 15 bp, Homo sapiens
gaaatgacatttaga

SEQ ID NO: 1894550 - DNA, 15 bp, Homo sapiens
aaatgacatttagaa

SEQ ID NO: 1894551 - DNA, 15 bp, Homo sapiens
aatgacatttagaaa

SEQ ID NO: 1894552 - DNA, 15 bp, Homo sapiens
atgacatttagaaat

SEQ ID NO: 1894553 - DNA, 15 bp, Homo sapiens
tgacatttagaaata

SEQ ID NO: 1894554 - DNA, 15 bp, Homo sapiens
gacatttagaaatat

SEQ ID NO: 1894555 - DNA, 15 bp, Homo sapiens
acatttagaaatatg

SEQ ID NO: 1894556 - DNA, 15 bp, Homo sapiens
catttagaaatatgg

SEQ ID NO: 1894557 - DNA, 15 bp, Homo sapiens
atttagaaatatgga

SEQ ID NO: 1894558 - DNA, 15 bp, Homo sapiens
tttagaaatatggaa

SEQ ID NO: 1894559 - DNA, 15 bp, Homo sapiens
ttagaaatatggaaa

SEQ ID NO: 1894560 - DNA, 15 bp, Homo sapiens
tagaaatatggaaat

SEQ ID NO: 1894561 - DNA, 15 bp, Homo sapiens
agaaatatggaaatc

SEQ ID NO: 1894562 - DNA, 15 bp, Homo sapiens
gaaatatggaaatcc

SEQ ID NO: 1894563 - DNA, 15 bp, Homo sapiens
aaatatggaaatcca

SEQ ID NO: 1894564 - DNA, 15 bp, Homo sapiens
aatatggaaatccat

SEQ ID NO: 1894565 - DNA, 15 bp, Homo sapiens
atatggaaatccatt

SEQ ID NO: 1894566 - DNA, 15 bp, Homo sapiens
tatggaaatccatta

SEQ ID NO: 1894567 - DNA, 15 bp, Homo sapiens
atggaaatccattaa

SEQ ID NO: 1894568 - DNA, 15 bp, Homo sapiens
tggaaatccattaag

SEQ ID NO: 1894569 - DNA, 15 bp, Homo sapiens
ggaaatccattaaga

SEQ ID NO: 1894570 - DNA, 15 bp, Homo sapiens
gaaatccattaagag

SEQ ID NO: 1894571 - DNA, 15 bp, Homo sapiens
aaatccattaagagt

SEQ ID NO: 1894572 - DNA, 15 bp, Homo sapiens
aatccattaagagtc

SEQ ID NO: 1894573 - DNA, 15 bp, Homo sapiens
atccattaagagtct

SEQ ID NO: 1894574 - DNA, 15 bp, Homo sapiens
tccattaagagtctt

SEQ ID NO: 1894575 - DNA, 15 bp, Homo sapiens
ccattaagagtcttt

SEQ ID NO: 1894576 - DNA, 15 bp, Homo sapiens
cattaagagtcttta

SEQ ID NO: 1894577 - DNA, 15 bp, Homo sapiens
attaagagtctttaa

SEQ ID NO: 1894578 - DNA, 15 bp, Homo sapiens
ttaagagtctttaag

SEQ ID NO: 1894579 - DNA, 15 bp, Homo sapiens
taagagtctttaagg

SEQ ID NO: 1894580 - DNA, 15 bp, Homo sapiens
aagagtctttaagga

SEQ ID NO: 1894581 - DNA, 15 bp, Homo sapiens
agagtctttaaggag

SEQ ID NO: 1894582 - DNA, 15 bp, Homo sapiens
gagtctttaaggagc

SEQ ID NO: 1894583 - DNA, 15 bp, Homo sapiens
agtctttaaggagct

SEQ ID NO: 1894584 - DNA, 15 bp, Homo sapiens
gtctttaaggagctt

SEQ ID NO: 1894585 - DNA, 15 bp, Homo sapiens
tctttaaggagcttg

SEQ ID NO: 1894586 - DNA, 15 bp, Homo sapiens
ctttaaggagcttgg

SEQ ID NO: 1894587 - DNA, 15 bp, Homo sapiens
tttaaggagcttggg

SEQ ID NO: 1894588 - DNA, 15 bp, Homo sapiens
ttaaggagcttgggg

SEQ ID NO: 1894589 - DNA, 15 bp, Homo sapiens
taaggagcttgggga

SEQ ID NO: 1894590 - DNA, 15 bp, Homo sapiens
aaggagcttggggag

SEQ ID NO: 1894591 - DNA, 15 bp, Homo sapiens
aggagcttggggaga

SEQ ID NO: 1894592 - DNA, 15 bp, Homo sapiens
ggagcttggggagag

SEQ ID NO: 1894593 - DNA, 15 bp, Homo sapiens
gagcttggggagagg

SEQ ID NO: 1894594 - DNA, 15 bp, Homo sapiens
agcttggggagagga

SEQ ID NO: 1894595 - DNA, 15 bp, Homo sapiens
gcttggggagaggag

SEQ ID NO: 1894596 - DNA, 15 bp, Homo sapiens
cttggggagaggagc

SEQ ID NO: 1894597 - DNA, 15 bp, Homo sapiens
ttggggagaggagct

SEQ ID NO: 1894598 - DNA, 15 bp, Homo sapiens
tggggagaggagctt

SEQ ID NO: 1894599 - DNA, 15 bp, Homo sapiens
ggggagaggagcttt

SEQ ID NO: 1894600 - DNA, 15 bp, Homo sapiens
gggagaggagcttta

SEQ ID NO: 1894601 - DNA, 15 bp, Homo sapiens
ggagaggagctttaa

SEQ ID NO: 1894602 - DNA, 15 bp, Homo sapiens
gagaggagctttaat

SEQ ID NO: 1894603 - DNA, 15 bp, Homo sapiens
agaggagctttaata

SEQ ID NO: 1894604 - DNA, 15 bp, Homo sapiens
gaggagctttaataa

SEQ ID NO: 1894605 - DNA, 15 bp, Homo sapiens
aggagctttaataag

SEQ ID NO: 1894606 - DNA, 15 bp, Homo sapiens
ggagctttaataaga

SEQ ID NO: 1894607 - DNA, 15 bp, Homo sapiens
gagctttaataagaa

SEQ ID NO: 1894608 - DNA, 15 bp, Homo sapiens
agctttaataagaaa

SEQ ID NO: 1894609 - DNA, 15 bp, Homo sapiens
gctttaataagaaaa

SEQ ID NO: 1894610 - DNA, 15 bp, Homo sapiens
ctttaataagaaaag

SEQ ID NO: 1894611 - DNA, 15 bp, Homo sapiens
tttaataagaaaagc

SEQ ID NO: 1894612 - DNA, 15 bp, Homo sapiens
ttaataagaaaagcc

SEQ ID NO: 1894613 - DNA, 15 bp, Homo sapiens
taataagaaaagcca

SEQ ID NO: 1894614 - DNA, 15 bp, Homo sapiens
aataagaaaagccat

SEQ ID NO: 1894615 - DNA, 15 bp, Homo sapiens
ataagaaaagccatc

SEQ ID NO: 1894616 - DNA, 15 bp, Homo sapiens
taagaaaagccatct

SEQ ID NO: 1894617 - DNA, 15 bp, Homo sapiens
aagaaaagccatctg

SEQ ID NO: 1894618 - DNA, 15 bp, Homo sapiens
agaaaagccatctgc

SEQ ID NO: 1894619 - DNA, 15 bp, Homo sapiens
gaaaagccatctgca

SEQ ID NO: 1894620 - DNA, 15 bp, Homo sapiens
aaaagccatctgcat

SEQ ID NO: 1894621 - DNA, 15 bp, Homo sapiens
aaagccatctgcatt

SEQ ID NO: 1894622 - DNA, 15 bp, Homo sapiens
aagccatctgcattg

SEQ ID NO: 1894623 - DNA, 15 bp, Homo sapiens
agccatctgcattga

SEQ ID NO: 1894624 - DNA, 15 bp, Homo sapiens
gccatctgcattgac

SEQ ID NO: 1894625 - DNA, 15 bp, Homo sapiens
ccatctgcattgaca

SEQ ID NO: 1894626 - DNA, 15 bp, Homo sapiens
catctgcattgacag

SEQ ID NO: 1894627 - DNA, 15 bp, Homo sapiens
atctgcattgacagc

SEQ ID NO: 1894628 - DNA, 15 bp, Homo sapiens
tctgcattgacagcc

SEQ ID NO: 1894629 - DNA, 15 bp, Homo sapiens
ctgcattgacagcca

SEQ ID NO: 1894630 - DNA, 15 bp, Homo sapiens
tgcattgacagccaa

SEQ ID NO: 1894631 - DNA, 15 bp, Homo sapiens
gcattgacagccaag

SEQ ID NO: 1894632 - DNA, 15 bp, Homo sapiens
cattgacagccaaga

SEQ ID NO: 1894633 - DNA, 15 bp, Homo sapiens
attgacagccaagaa

SEQ ID NO: 1894634 - DNA, 15 bp, Homo sapiens
ttgacagccaagaac

SEQ ID NO: 1894635 - DNA, 15 bp, Homo sapiens
tgacagccaagaacc

SEQ ID NO: 1894636 - DNA, 15 bp, Homo sapiens
gacagccaagaacca

SEQ ID NO: 1894637 - DNA, 15 bp, Homo sapiens
acagccaagaaccat

SEQ ID NO: 1894638 - DNA, 15 bp, Homo sapiens
cagccaagaaccatt

SEQ ID NO: 1894639 - DNA, 15 bp, Homo sapiens
agccaagaaccattg

SEQ ID NO: 1894640 - DNA, 15 bp, Homo sapiens
ccaagaaccattgtt

SEQ ID NO: 1894641 - DNA, 15 bp, Homo sapiens
caagaaccattgttt

SEQ ID NO: 1894642 - DNA, 15 bp, Homo sapiens
aagaaccattgtttc

SEQ ID NO: 1894643 - DNA, 15 bp, Homo sapiens
agaaccattgtttct

SEQ ID NO: 1894644 - DNA, 15 bp, Homo sapiens
gaaccattgtttctt

SEQ ID NO: 1894645 - DNA, 15 bp, Homo sapiens
aaccattgtttcttt

SEQ ID NO: 1894646 - DNA, 15 bp, Homo sapiens
accattgtttctttg

SEQ ID NO: 1894647 - DNA, 15 bp, Homo sapiens
ccattgtttctttgt

SEQ ID NO: 1894648 - DNA, 15 bp, Homo sapiens
cattgtttctttgtt

SEQ ID NO: 1894649 - DNA, 15 bp, Homo sapiens
attgtttctttgttg

SEQ ID NO: 1894650 - DNA, 15 bp, Homo sapiens
ttgtttctttgttga

SEQ ID NO: 1894651 - DNA, 15 bp, Homo sapiens
tgtttctttgttgaa

SEQ ID NO: 1894652 - DNA, 15 bp, Homo sapiens
gtttctttgttgaaa

SEQ ID NO: 1894653 - DNA, 15 bp, Homo sapiens
tttctttgttgaaaa

SEQ ID NO: 1894654 - DNA, 15 bp, Homo sapiens
ttctttgttgaaaac

SEQ ID NO: 1894655 - DNA, 15 bp, Homo sapiens
tctttgttgaaaact

SEQ ID NO: 1894656 - DNA, 15 bp, Homo sapiens
ctttgttgaaaactg

SEQ ID NO: 1894657 - DNA, 15 bp, Homo sapiens
tttgttgaaaactga

SEQ ID NO: 1894658 - DNA, 15 bp, Homo sapiens
ttgttgaaaactgac

SEQ ID NO: 1894659 - DNA, 15 bp, Homo sapiens
tgttgaaaactgacc

SEQ ID NO: 1894660 - DNA, 15 bp, Homo sapiens
gttgaaaactgacca

SEQ ID NO: 1894661 - DNA, 15 bp, Homo sapiens
ttgaaaactgaccat

SEQ ID NO: 1894662 - DNA, 15 bp, Homo sapiens
tgaaaactgaccatt

SEQ ID NO: 1894663 - DNA, 15 bp, Homo sapiens
gaaaactgaccattt

SEQ ID NO: 1894664 - DNA, 15 bp, Homo sapiens
aaaactgaccatttc

SEQ ID NO: 1894665 - DNA, 15 bp, Homo sapiens
aaactgaccatttca

SEQ ID NO: 1894666 - DNA, 15 bp, Homo sapiens
aactgaccatttcaa

SEQ ID NO: 1894667 - DNA, 15 bp, Homo sapiens
actgaccatttcaac

SEQ ID NO: 1894668 - DNA, 15 bp, Homo sapiens
ctgaccatttcaacc

SEQ ID NO: 1894669 - DNA, 15 bp, Homo sapiens
tgaccatttcaacct

SEQ ID NO: 1894670 - DNA, 15 bp, Homo sapiens
gaccatttcaacctg

SEQ ID NO: 1894671 - DNA, 15 bp, Homo sapiens
accatttcaacctgc

SEQ ID NO: 1894672 - DNA, 15 bp, Homo sapiens
ccatttcaacctgca

SEQ ID NO: 1894673 - DNA, 15 bp, Homo sapiens
catttcaacctgcac

SEQ ID NO: 1894674 - DNA, 15 bp, Homo sapiens
atttcaacctgcaca

SEQ ID NO: 1894675 - DNA, 15 bp, Homo sapiens
tttcaacctgcacat

SEQ ID NO: 1894676 - DNA, 15 bp, Homo sapiens
ttcaacctgcacatg

SEQ ID NO: 1894677 - DNA, 15 bp, Homo sapiens
tcaacctgcacatgc

SEQ ID NO: 1894678 - DNA, 15 bp, Homo sapiens
caacctgcacatgca

SEQ ID NO: 1894679 - DNA, 15 bp, Homo sapiens
aacctgcacatgcag

SEQ ID NO: 1894680 - DNA, 15 bp, Homo sapiens
acctgcacatgcagt

SEQ ID NO: 1894681 - DNA, 15 bp, Homo sapiens
cctgcacatgcagtt

SEQ ID NO: 1894682 - DNA, 15 bp, Homo sapiens
ctgcacatgcagttg

SEQ ID NO: 1894683 - DNA, 15 bp, Homo sapiens
tgcacatgcagttga

SEQ ID NO: 1894684 - DNA, 15 bp, Homo sapiens
gcacatgcagttgag

SEQ ID NO: 1894685 - DNA, 15 bp, Homo sapiens
cacatgcagttgagg

SEQ ID NO: 1894686 - DNA, 15 bp, Homo sapiens
acatgcagttgagga

SEQ ID NO: 1894687 - DNA, 15 bp, Homo sapiens
catgcagttgaggat

SEQ ID NO: 1894688 - DNA, 15 bp, Homo sapiens
atgcagttgaggata

SEQ ID NO: 1894689 - DNA, 15 bp, Homo sapiens
tgcagttgaggataa

SEQ ID NO: 1894690 - DNA, 15 bp, Homo sapiens
gcagttgaggataag

SEQ ID NO: 1894691 - DNA, 15 bp, Homo sapiens
cagttgaggataagt

SEQ ID NO: 1894692 - DNA, 15 bp, Homo sapiens
agttgaggataagtt

SEQ ID NO: 1894693 - DNA, 15 bp, Homo sapiens
gttgaggataagttt

SEQ ID NO: 1894694 - DNA, 15 bp, Homo sapiens
ttgaggataagttta

SEQ ID NO: 1894695 - DNA, 15 bp, Homo sapiens
tgaggataagtttac

SEQ ID NO: 1894696 - DNA, 15 bp, Homo sapiens
gaggataagtttact

SEQ ID NO: 1894697 - DNA, 15 bp, Homo sapiens
aggataagtttactg

SEQ ID NO: 1894698 - DNA, 15 bp, Homo sapiens
ggataagtttactga

SEQ ID NO: 1894699 - DNA, 15 bp, Homo sapiens
gataagtttactgat

SEQ ID NO: 1894700 - DNA, 15 bp, Homo sapiens
ataagtttactgatc

SEQ ID NO: 1894701 - DNA, 15 bp, Homo sapiens
taagtttactgatct

SEQ ID NO: 1894702 - DNA, 15 bp, Homo sapiens
aagtttactgatctt

SEQ ID NO: 1894703 - DNA, 15 bp, Homo sapiens
agtttactgatcttg

SEQ ID NO: 1894704 - DNA, 15 bp, Homo sapiens
gtttactgatcttgc

SEQ ID NO: 1894705 - DNA, 15 bp, Homo sapiens
tttactgatcttgcc

SEQ ID NO: 1894706 - DNA, 15 bp, Homo sapiens
ttactgatcttgcca

SEQ ID NO: 1894707 - DNA, 15 bp, Homo sapiens
tactgatcttgccac

SEQ ID NO: 1894708 - DNA, 15 bp, Homo sapiens
actgatcttgccaca

SEQ ID NO: 1894709 - DNA, 15 bp, Homo sapiens
ctgatcttgccacag

SEQ ID NO: 1894710 - DNA, 15 bp, Homo sapiens
tgatcttgccacaga

SEQ ID NO: 1894711 - DNA, 15 bp, Homo sapiens
gatcttgccacagat

SEQ ID NO: 1894712 - DNA, 15 bp, Homo sapiens
atcttgccacagatg

SEQ ID NO: 1894713 - DNA, 15 bp, Homo sapiens
tcttgccacagatga

SEQ ID NO: 1894714 - DNA, 15 bp, Homo sapiens
cttgccacagatgag

SEQ ID NO: 1894715 - DNA, 15 bp, Homo sapiens
ttgccacagatgagt

SEQ ID NO: 1894716 - DNA, 15 bp, Homo sapiens
tgccacagatgagtt

SEQ ID NO: 1894717 - DNA, 15 bp, Homo sapiens
gccacagatgagttt

SEQ ID NO: 1894718 - DNA, 15 bp, Homo sapiens
ccacagatgagtttc

SEQ ID NO: 1894719 - DNA, 15 bp, Homo sapiens
cacagatgagtttca

SEQ ID NO: 1894720 - DNA, 15 bp, Homo sapiens
acagatgagtttcaa

SEQ ID NO: 1894721 - DNA, 15 bp, Homo sapiens
cagatgagtttcaaa

SEQ ID NO: 1894722 - DNA, 15 bp, Homo sapiens
agatgagtttcaaac

SEQ ID NO: 1894723 - DNA, 15 bp, Homo sapiens
gatgagtttcaaaca

SEQ ID NO: 1894724 - DNA, 15 bp, Homo sapiens
atgagtttcaaacag

SEQ ID NO: 1894725 - DNA, 15 bp, Homo sapiens
tgagtttcaaacaga

SEQ ID NO: 1894726 - DNA, 15 bp, Homo sapiens
gagtttcaaacagaa

SEQ ID NO: 1894727 - DNA, 15 bp, Homo sapiens
agtttcaaacagaag

SEQ ID NO: 1894728 - DNA, 15 bp, Homo sapiens
gtttcaaacagaagg

SEQ ID NO: 1894729 - DNA, 15 bp, Homo sapiens
tttcaaacagaagga

SEQ ID NO: 1894730 - DNA, 15 bp, Homo sapiens
ttcaaacagaaggaa

SEQ ID NO: 1894731 - DNA, 15 bp, Homo sapiens
tcaaacagaaggaat

SEQ ID NO: 1894732 - DNA, 15 bp, Homo sapiens
caaacagaaggaata

SEQ ID NO: 1894733 - DNA, 15 bp, Homo sapiens
aaacagaaggaataa

SEQ ID NO: 1894734 - DNA, 15 bp, Homo sapiens
aacagaaggaataag

SEQ ID NO: 1894735 - DNA, 15 bp, Homo sapiens
acagaaggaataagg

SEQ ID NO: 1894736 - DNA, 15 bp, Homo sapiens
cagaaggaataagga

SEQ ID NO: 1894737 - DNA, 15 bp, Homo sapiens
agaaggaataaggaa

SEQ ID NO: 1894738 - DNA, 15 bp, Homo sapiens
gaaggaataaggaaa

SEQ ID NO: 1894739 - DNA, 15 bp, Homo sapiens
aaggaataaggaaaa

SEQ ID NO: 1894740 - DNA, 15 bp, Homo sapiens
aggaataaggaaaac

SEQ ID NO: 1894741 - DNA, 15 bp, Homo sapiens
ggaataaggaaaaca

SEQ ID NO: 1894742 - DNA, 15 bp, Homo sapiens
gaataaggaaaacag

SEQ ID NO: 1894743 - DNA, 15 bp, Homo sapiens
aataaggaaaacagt

SEQ ID NO: 1894744 - DNA, 15 bp, Homo sapiens
ataaggaaaacagta

SEQ ID NO: 1894745 - DNA, 15 bp, Homo sapiens
taaggaaaacagtat

SEQ ID NO: 1894746 - DNA, 15 bp, Homo sapiens
aaggaaaacagtatc

SEQ ID NO: 1894747 - DNA, 15 bp, Homo sapiens
aggaaaacagtatca

SEQ ID NO: 1894748 - DNA, 15 bp, Homo sapiens
ggaaaacagtatcaa

SEQ ID NO: 1894749 - DNA, 15 bp, Homo sapiens
gaaaacagtatcaat

SEQ ID NO: 1894750 - DNA, 15 bp, Homo sapiens
aaaacagtatcaatt

SEQ ID NO: 1894751 - DNA, 15 bp, Homo sapiens
aaacagtatcaattg

SEQ ID NO: 1894752 - DNA, 15 bp, Homo sapiens
aacagtatcaattgt

SEQ ID NO: 1894753 - DNA, 15 bp, Homo sapiens
acagtatcaattgtt

SEQ ID NO: 1894754 - DNA, 15 bp, Homo sapiens
cagtatcaattgttt

SEQ ID NO: 1894755 - DNA, 15 bp, Homo sapiens
agtatcaattgtttc

SEQ ID NO: 1894756 - DNA, 15 bp, Homo sapiens
gtatcaattgtttcc

SEQ ID NO: 1894757 - DNA, 15 bp, Homo sapiens
tatcaattgtttccc

SEQ ID NO: 1894758 - DNA, 15 bp, Homo sapiens
atcaattgtttccct

SEQ ID NO: 1894759 - DNA, 15 bp, Homo sapiens
tcaattgtttccctg

SEQ ID NO: 1894760 - DNA, 15 bp, Homo sapiens
caattgtttccctgg

SEQ ID NO: 1894761 - DNA, 15 bp, Homo sapiens
aattgtttccctgga

SEQ ID NO: 1894762 - DNA, 15 bp, Homo sapiens
attgtttccctggaa

SEQ ID NO: 1894763 - DNA, 15 bp, Homo sapiens
ttgtttccctggaac

SEQ ID NO: 1894764 - DNA, 15 bp, Homo sapiens
tgtttccctggaact

SEQ ID NO: 1894765 - DNA, 15 bp, Homo sapiens
gtttccctggaactc

SEQ ID NO: 1894766 - DNA, 15 bp, Homo sapiens
tttccctggaactcc

SEQ ID NO: 1894767 - DNA, 15 bp, Homo sapiens
ttccctggaactcca

SEQ ID NO: 1894768 - DNA, 15 bp, Homo sapiens
tccctggaactccat

SEQ ID NO: 1894769 - DNA, 15 bp, Homo sapiens
ccctggaactccatt

SEQ ID NO: 1894770 - DNA, 15 bp, Homo sapiens
cctggaactccattc

SEQ ID NO: 1894771 - DNA, 15 bp, Homo sapiens
ctggaactccattca

SEQ ID NO: 1894772 - DNA, 15 bp, Homo sapiens
tggaactccattcag

SEQ ID NO: 1894773 - DNA, 15 bp, Homo sapiens
ggaactccattcaga

SEQ ID NO: 1894774 - DNA, 15 bp, Homo sapiens
gaactccattcagat

SEQ ID NO: 1894775 - DNA, 15 bp, Homo sapiens
aactccattcagatt

SEQ ID NO: 1894776 - DNA, 15 bp, Homo sapiens
actccattcagattt

SEQ ID NO: 1894777 - DNA, 15 bp, Homo sapiens
ctccattcagatttc

SEQ ID NO: 1894778 - DNA, 15 bp, Homo sapiens
tccattcagatttca

SEQ ID NO: 1894779 - DNA, 15 bp, Homo sapiens
ccattcagatttcaa

SEQ ID NO: 1894780 - DNA, 15 bp, Homo sapiens
cattcagatttcaag

SEQ ID NO: 1894781 - DNA, 15 bp, Homo sapiens
attcagatttcaagg

SEQ ID NO: 1894782 - DNA, 15 bp, Homo sapiens
ttcagatttcaaggc

SEQ ID NO: 1894783 - DNA, 15 bp, Homo sapiens
tcagatttcaaggcg

SEQ ID NO: 1894784 - DNA, 15 bp, Homo sapiens
cagatttcaaggcga

SEQ ID NO: 1894785 - DNA, 15 bp, Homo sapiens
agatttcaaggcgag

SEQ ID NO: 1894786 - DNA, 15 bp, Homo sapiens
gatttcaaggcgagt

SEQ ID NO: 1894787 - DNA, 15 bp, Homo sapiens
atttcaaggcgagtg

SEQ ID NO: 1894788 - DNA, 15 bp, Homo sapiens
tttcaaggcgagtgc

SEQ ID NO: 1894789 - DNA, 15 bp, Homo sapiens
ttcaaggcgagtgca

SEQ ID NO: 1894790 - DNA, 15 bp, Homo sapiens
tcaaggcgagtgcaa

SEQ ID NO: 1894791 - DNA, 15 bp, Homo sapiens
caaggcgagtgcaat

SEQ ID NO: 1894792 - DNA, 15 bp, Homo sapiens
aaggcgagtgcaatc

SEQ ID NO: 1894793 - DNA, 15 bp, Homo sapiens
aggcgagtgcaatca

SEQ ID NO: 1894794 - DNA, 15 bp, Homo sapiens
ggcgagtgcaatcag

SEQ ID NO: 1894795 - DNA, 15 bp, Homo sapiens
gcgagtgcaatcaga

SEQ ID NO: 1894796 - DNA, 15 bp, Homo sapiens
cgagtgcaatcagaa

SEQ ID NO: 1894797 - DNA, 15 bp, Homo sapiens
gagtgcaatcagaaa

SEQ ID NO: 1894798 - DNA, 15 bp, Homo sapiens
agtgcaatcagaaag

SEQ ID NO: 1894799 - DNA, 15 bp, Homo sapiens
gtgcaatcagaaagg

SEQ ID NO: 1894800 - DNA, 15 bp, Homo sapiens
tgcaatcagaaagga

SEQ ID NO: 1894801 - DNA, 15 bp, Homo sapiens
gcaatcagaaaggat

SEQ ID NO: 1894802 - DNA, 15 bp, Homo sapiens
caatcagaaaggatg

SEQ ID NO: 1894803 - DNA, 15 bp, Homo sapiens
aatcagaaaggatga

SEQ ID NO: 1894804 - DNA, 15 bp, Homo sapiens
atcagaaaggatgat

SEQ ID NO: 1894805 - DNA, 15 bp, Homo sapiens
tcagaaaggatgatt

SEQ ID NO: 1894806 - DNA, 15 bp, Homo sapiens
cagaaaggatgattt

SEQ ID NO: 1894807 - DNA, 15 bp, Homo sapiens
agaaaggatgatttc

SEQ ID NO: 1894808 - DNA, 15 bp, Homo sapiens
gaaaggatgatttct

SEQ ID NO: 1894809 - DNA, 15 bp, Homo sapiens
aaaggatgatttcta

SEQ ID NO: 1894810 - DNA, 15 bp, Homo sapiens
aaggatgatttctaa

SEQ ID NO: 1894811 - DNA, 15 bp, Homo sapiens
aggatgatttctaac

SEQ ID NO: 1894812 - DNA, 15 bp, Homo sapiens
ggatgatttctaact

SEQ ID NO: 1894813 - DNA, 15 bp, Homo sapiens
gatgatttctaactt

SEQ ID NO: 1894814 - DNA, 15 bp, Homo sapiens
atgatttctaacttg

SEQ ID NO: 1894815 - DNA, 15 bp, Homo sapiens
tgatttctaacttgg

SEQ ID NO: 1894816 - DNA, 15 bp, Homo sapiens
gatttctaacttggc

SEQ ID NO: 1894817 - DNA, 15 bp, Homo sapiens
atttctaacttggct

SEQ ID NO: 1894818 - DNA, 15 bp, Homo sapiens
tttctaacttggctg

SEQ ID NO: 1894819 - DNA, 15 bp, Homo sapiens
ttctaacttggctgg

SEQ ID NO: 1894820 - DNA, 15 bp, Homo sapiens
tctaacttggctggg

SEQ ID NO: 1894821 - DNA, 15 bp, Homo sapiens
ctaacttggctgggt

SEQ ID NO: 1894822 - DNA, 15 bp, Homo sapiens
taacttggctgggtt

SEQ ID NO: 1894823 - DNA, 15 bp, Homo sapiens
aacttggctgggttg

SEQ ID NO: 1894824 - DNA, 15 bp, Homo sapiens
acttggctgggttga

SEQ ID NO: 1894825 - DNA, 15 bp, Homo sapiens
cttggctgggttgat

SEQ ID NO: 1894826 - DNA, 15 bp, Homo sapiens
ttggctgggttgatt

SEQ ID NO: 1894827 - DNA, 15 bp, Homo sapiens
tggctgggttgattt

SEQ ID NO: 1894828 - DNA, 15 bp, Homo sapiens
ggctgggttgattta

SEQ ID NO: 1894829 - DNA, 15 bp, Homo sapiens
gctgggttgatttaa

SEQ ID NO: 1894830 - DNA, 15 bp, Homo sapiens
ctgggttgatttaat

SEQ ID NO: 1894831 - DNA, 15 bp, Homo sapiens
tgggttgatttaatc

SEQ ID NO: 1894832 - DNA, 15 bp, Homo sapiens
gggttgatttaatcc

SEQ ID NO: 1894833 - DNA, 15 bp, Homo sapiens
ggttgatttaatccc

SEQ ID NO: 1894834 - DNA, 15 bp, Homo sapiens
gttgatttaatccct

SEQ ID NO: 1894835 - DNA, 15 bp, Homo sapiens
ttgatttaatccctt

SEQ ID NO: 1894836 - DNA, 15 bp, Homo sapiens
tgatttaatcccttt

SEQ ID NO: 1894837 - DNA, 15 bp, Homo sapiens
gatttaatccctttc

SEQ ID NO: 1894838 - DNA, 15 bp, Homo sapiens
atttaatccctttcc

SEQ ID NO: 1894839 - DNA, 15 bp, Homo sapiens
tttaatccctttcca

SEQ ID NO: 1894840 - DNA, 15 bp, Homo sapiens
ttaatccctttccag

SEQ ID NO: 1894841 - DNA, 15 bp, Homo sapiens
taatccctttccaga

SEQ ID NO: 1894842 - DNA, 15 bp, Homo sapiens
aatccctttccagat

SEQ ID NO: 1894843 - DNA, 15 bp, Homo sapiens
atccctttccagatg

SEQ ID NO: 1894844 - DNA, 15 bp, Homo sapiens
tccctttccagatga

SEQ ID NO: 1894845 - DNA, 15 bp, Homo sapiens
ccctttccagatgat

SEQ ID NO: 1894846 - DNA, 15 bp, Homo sapiens
cctttccagatgatt

SEQ ID NO: 1894847 - DNA, 15 bp, Homo sapiens
ctttccagatgattg

SEQ ID NO: 1894848 - DNA, 15 bp, Homo sapiens
tttccagatgattga

SEQ ID NO: 1894849 - DNA, 15 bp, Homo sapiens
ttccagatgattgac

SEQ ID NO: 1894850 - DNA, 15 bp, Homo sapiens
tccagatgattgaca

SEQ ID NO: 1894851 - DNA, 15 bp, Homo sapiens
ccagatgattgacat

SEQ ID NO: 1894852 - DNA, 15 bp, Homo sapiens
cagatgattgacatt

SEQ ID NO: 1894853 - DNA, 15 bp, Homo sapiens
agatgattgacattt

SEQ ID NO: 1894854 - DNA, 15 bp, Homo sapiens
gatgattgacatttt

SEQ ID NO: 1894855 - DNA, 15 bp, Homo sapiens
atgattgacattttc

SEQ ID NO: 1894856 - DNA, 15 bp, Homo sapiens
tgattgacattttct

SEQ ID NO: 1894857 - DNA, 15 bp, Homo sapiens
gattgacattttctg

SEQ ID NO: 1894858 - DNA, 15 bp, Homo sapiens
attgacattttctgc

SEQ ID NO: 1894859 - DNA, 15 bp, Homo sapiens
ttgacattttctgct

SEQ ID NO: 1894860 - DNA, 15 bp, Homo sapiens
tgacattttctgctc

SEQ ID NO: 1894861 - DNA, 15 bp, Homo sapiens
gacattttctgctcg

SEQ ID NO: 1894862 - DNA, 15 bp, Homo sapiens
acattttctgctcgg

SEQ ID NO: 1894863 - DNA, 15 bp, Homo sapiens
cattttctgctcggc

SEQ ID NO: 1894864 - DNA, 15 bp, Homo sapiens
attttctgctcggca

SEQ ID NO: 1894865 - DNA, 15 bp, Homo sapiens
ttttctgctcggcag

SEQ ID NO: 1894866 - DNA, 15 bp, Homo sapiens
tttctgctcggcaga

SEQ ID NO: 1894867 - DNA, 15 bp, Homo sapiens
ttctgctcggcagag

SEQ ID NO: 1894868 - DNA, 15 bp, Homo sapiens
tctgctcggcagagt

SEQ ID NO: 1894869 - DNA, 15 bp, Homo sapiens
ctgctcggcagagtt

SEQ ID NO: 1894870 - DNA, 15 bp, Homo sapiens
tgctcggcagagttc

SEQ ID NO: 1894871 - DNA, 15 bp, Homo sapiens
gctcggcagagttca

SEQ ID NO: 1894872 - DNA, 15 bp, Homo sapiens
ctcggcagagttcag

SEQ ID NO: 1894873 - DNA, 15 bp, Homo sapiens
tcggcagagttcagg

SEQ ID NO: 1894874 - DNA, 15 bp, Homo sapiens
cggcagagttcaggg

SEQ ID NO: 1894875 - DNA, 15 bp, Homo sapiens
ggcagagttcaggga

SEQ ID NO: 1894876 - DNA, 15 bp, Homo sapiens
gcagagttcagggac

SEQ ID NO: 1894877 - DNA, 15 bp, Homo sapiens
cagagttcagggact

SEQ ID NO: 1894878 - DNA, 15 bp, Homo sapiens
agagttcagggactg

SEQ ID NO: 1894879 - DNA, 15 bp, Homo sapiens
gagttcagggactgg

SEQ ID NO: 1894880 - DNA, 15 bp, Homo sapiens
agttcagggactgga

SEQ ID NO: 1894881 - DNA, 15 bp, Homo sapiens
gttcagggactggaa

SEQ ID NO: 1894882 - DNA, 15 bp, Homo sapiens
ttcagggactggaat

SEQ ID NO: 1894883 - DNA, 15 bp, Homo sapiens
tcagggactggaatt

SEQ ID NO: 1894884 - DNA, 15 bp, Homo sapiens
cagggactggaattg

SEQ ID NO: 1894885 - DNA, 15 bp, Homo sapiens
agggactggaattgc

SEQ ID NO: 1894886 - DNA, 15 bp, Homo sapiens
gggactggaattgca

SEQ ID NO: 1894887 - DNA, 15 bp, Homo sapiens
ggactggaattgcaa

SEQ ID NO: 1894888 - DNA, 15 bp, Homo sapiens
gactggaattgcaag

SEQ ID NO: 1894889 - DNA, 15 bp, Homo sapiens
actggaattgcaaga

SEQ ID NO: 1894890 - DNA, 15 bp, Homo sapiens
ctggaattgcaagag

SEQ ID NO: 1894891 - DNA, 15 bp, Homo sapiens
tggaattgcaagagt

SEQ ID NO: 1894892 - DNA, 15 bp, Homo sapiens
ggaattgcaagagta

SEQ ID NO: 1894893 - DNA, 15 bp, Homo sapiens
gaattgcaagagtat

SEQ ID NO: 1894894 - DNA, 15 bp, Homo sapiens
aattgcaagagtatt

SEQ ID NO: 1894895 - DNA, 15 bp, Homo sapiens
attgcaagagtattt

SEQ ID NO: 1894896 - DNA, 15 bp, Homo sapiens
ttgcaagagtatttt

SEQ ID NO: 1894897 - DNA, 15 bp, Homo sapiens
tgcaagagtattttc

SEQ ID NO: 1894898 - DNA, 15 bp, Homo sapiens
gcaagagtattttca

SEQ ID NO: 1894899 - DNA, 15 bp, Homo sapiens
caagagtattttcat

SEQ ID NO: 1894900 - DNA, 15 bp, Homo sapiens
aagagtattttcatg

SEQ ID NO: 1894901 - DNA, 15 bp, Homo sapiens
agagtattttcatgc

SEQ ID NO: 1894902 - DNA, 15 bp, Homo sapiens
gagtattttcatgcg

SEQ ID NO: 1894903 - DNA, 15 bp, Homo sapiens
agtattttcatgcgt

SEQ ID NO: 1894904 - DNA, 15 bp, Homo sapiens
gtattttcatgcgtg

SEQ ID NO: 1894905 - DNA, 15 bp, Homo sapiens
tattttcatgcgtgt

SEQ ID NO: 1894906 - DNA, 15 bp, Homo sapiens
attttcatgcgtgtt

SEQ ID NO: 1894907 - DNA, 15 bp, Homo sapiens
ttttcatgcgtgttg

SEQ ID NO: 1894908 - DNA, 15 bp, Homo sapiens
tttcatgcgtgttga

SEQ ID NO: 1894909 - DNA, 15 bp, Homo sapiens
ttcatgcgtgttgaa

SEQ ID NO: 1894910 - DNA, 15 bp, Homo sapiens
tcatgcgtgttgaag

SEQ ID NO: 1894911 - DNA, 15 bp, Homo sapiens
catgcgtgttgaaga

SEQ ID NO: 1894912 - DNA, 15 bp, Homo sapiens
atgcgtgttgaagat

SEQ ID NO: 1894913 - DNA, 15 bp, Homo sapiens
tgcgtgttgaagatg

SEQ ID NO: 1894914 - DNA, 15 bp, Homo sapiens
gcgtgttgaagatga

SEQ ID NO: 1894915 - DNA, 15 bp, Homo sapiens
cgtgttgaagatgaa

SEQ ID NO: 1894916 - DNA, 15 bp, Homo sapiens
gtgttgaagatgaac

SEQ ID NO: 1894917 - DNA, 15 bp, Homo sapiens
tgttgaagatgaact

SEQ ID NO: 1894918 - DNA, 15 bp, Homo sapiens
gttgaagatgaactg

SEQ ID NO: 1894919 - DNA, 15 bp, Homo sapiens
ttgaagatgaactgg

SEQ ID NO: 1894920 - DNA, 15 bp, Homo sapiens
tgaagatgaactgga

SEQ ID NO: 1894921 - DNA, 15 bp, Homo sapiens
gaagatgaactggaa

SEQ ID NO: 1894922 - DNA, 15 bp, Homo sapiens
aagatgaactggaaa

SEQ ID NO: 1894923 - DNA, 15 bp, Homo sapiens
agatgaactggaaat

SEQ ID NO: 1894924 - DNA, 15 bp, Homo sapiens
gatgaactggaaatc

SEQ ID NO: 1894925 - DNA, 15 bp, Homo sapiens
atgaactggaaatcc

SEQ ID NO: 1894926 - DNA, 15 bp, Homo sapiens
tgaactggaaatccc

SEQ ID NO: 1894927 - DNA, 15 bp, Homo sapiens
gaactggaaatccct

SEQ ID NO: 1894928 - DNA, 15 bp, Homo sapiens
aactggaaatccctc

SEQ ID NO: 1894929 - DNA, 15 bp, Homo sapiens
actggaaatccctcc

SEQ ID NO: 1894930 - DNA, 15 bp, Homo sapiens
ctggaaatccctccg

SEQ ID NO: 1894931 - DNA, 15 bp, Homo sapiens
tggaaatccctccgg

SEQ ID NO: 1894932 - DNA, 15 bp, Homo sapiens
ggaaatccctccggc

SEQ ID NO: 1894933 - DNA, 15 bp, Homo sapiens
gaaatccctccggca

SEQ ID NO: 1894934 - DNA, 15 bp, Homo sapiens
aaatccctccggcac

SEQ ID NO: 1894935 - DNA, 15 bp, Homo sapiens
aatccctccggcacc

SEQ ID NO: 1894936 - DNA, 15 bp, Homo sapiens
atccctccggcacct

SEQ ID NO: 1894937 - DNA, 15 bp, Homo sapiens
tccctccggcacctc

SEQ ID NO: 1894938 - DNA, 15 bp, Homo sapiens
ccctccggcacctca

SEQ ID NO: 1894939 - DNA, 15 bp, Homo sapiens
cctccggcacctcaa

SEQ ID NO: 1894940 - DNA, 15 bp, Homo sapiens
ctccggcacctcaat

SEQ ID NO: 1894941 - DNA, 15 bp, Homo sapiens
tccggcacctcaatc

SEQ ID NO: 1894942 - DNA, 15 bp, Homo sapiens
ccggcacctcaatct

SEQ ID NO: 1894943 - DNA, 15 bp, Homo sapiens
cggcacctcaatctc

SEQ ID NO: 1894944 - DNA, 15 bp, Homo sapiens
ggcacctcaatctca

SEQ ID NO: 1894945 - DNA, 15 bp, Homo sapiens
gcacctcaatctcaa

SEQ ID NO: 1894946 - DNA, 15 bp, Homo sapiens
cacctcaatctcaac

SEQ ID NO: 1894947 - DNA, 15 bp, Homo sapiens
acctcaatctcaaca

SEQ ID NO: 1894948 - DNA, 15 bp, Homo sapiens
cctcaatctcaacat

SEQ ID NO: 1894949 - DNA, 15 bp, Homo sapiens
ctcaatctcaacatt

SEQ ID NO: 1894950 - DNA, 15 bp, Homo sapiens
tcaatctcaacattt

SEQ ID NO: 1894951 - DNA, 15 bp, Homo sapiens
caatctcaacatttc

SEQ ID NO: 1894952 - DNA, 15 bp, Homo sapiens
aatctcaacatttcc

SEQ ID NO: 1894953 - DNA, 15 bp, Homo sapiens
atctcaacatttcca

SEQ ID NO: 1894954 - DNA, 15 bp, Homo sapiens
tctcaacatttccaa

SEQ ID NO: 1894955 - DNA, 15 bp, Homo sapiens
ctcaacatttccaaa

SEQ ID NO: 1894956 - DNA, 15 bp, Homo sapiens
tcaacatttccaaaa

SEQ ID NO: 1894957 - DNA, 15 bp, Homo sapiens
caacatttccaaaac

SEQ ID NO: 1894958 - DNA, 15 bp, Homo sapiens
aacatttccaaaact

SEQ ID NO: 1894959 - DNA, 15 bp, Homo sapiens
acatttccaaaactg

SEQ ID NO: 1894960 - DNA, 15 bp, Homo sapiens
catttccaaaactga

SEQ ID NO: 1894961 - DNA, 15 bp, Homo sapiens
atttccaaaactgaa

SEQ ID NO: 1894962 - DNA, 15 bp, Homo sapiens
tttccaaaactgaac

SEQ ID NO: 1894963 - DNA, 15 bp, Homo sapiens
ttccaaaactgaact

SEQ ID NO: 1894964 - DNA, 15 bp, Homo sapiens
tccaaaactgaactc

SEQ ID NO: 1894965 - DNA, 15 bp, Homo sapiens
ccaaaactgaactca

SEQ ID NO: 1894966 - DNA, 15 bp, Homo sapiens
caaaactgaactcat

SEQ ID NO: 1894967 - DNA, 15 bp, Homo sapiens
aaaactgaactcatc

SEQ ID NO: 1894968 - DNA, 15 bp, Homo sapiens
aaactgaactcatca

SEQ ID NO: 1894969 - DNA, 15 bp, Homo sapiens
aactgaactcatcac

SEQ ID NO: 1894970 - DNA, 15 bp, Homo sapiens
actgaactcatcacc

SEQ ID NO: 1894971 - DNA, 15 bp, Homo sapiens
ctgaactcatcaccc

SEQ ID NO: 1894972 - DNA, 15 bp, Homo sapiens
tgaactcatcacccc

SEQ ID NO: 1894973 - DNA, 15 bp, Homo sapiens
gaactcatcacccct

SEQ ID NO: 1894974 - DNA, 15 bp, Homo sapiens
aactcatcacccctc

SEQ ID NO: 1894975 - DNA, 15 bp, Homo sapiens
actcatcacccctct

SEQ ID NO: 1894976 - DNA, 15 bp, Homo sapiens
ctcatcacccctctt

SEQ ID NO: 1894977 - DNA, 15 bp, Homo sapiens
tcatcacccctcttc

SEQ ID NO: 1894978 - DNA, 15 bp, Homo sapiens
catcacccctcttcc

SEQ ID NO: 1894979 - DNA, 15 bp, Homo sapiens
atcacccctcttccc

SEQ ID NO: 1894980 - DNA, 15 bp, Homo sapiens
tcacccctcttcccc

SEQ ID NO: 1894981 - DNA, 15 bp, Homo sapiens
cacccctcttccccc

SEQ ID NO: 1894982 - DNA, 15 bp, Homo sapiens
acccctcttccccca

SEQ ID NO: 1894983 - DNA, 15 bp, Homo sapiens
cccctcttcccccac

SEQ ID NO: 1894984 - DNA, 15 bp, Homo sapiens
ccctcttcccccacc

SEQ ID NO: 1894985 - DNA, 15 bp, Homo sapiens
cctcttcccccacca

SEQ ID NO: 1894986 - DNA, 15 bp, Homo sapiens
ctcttcccccaccac

SEQ ID NO: 1894987 - DNA, 15 bp, Homo sapiens
tcttcccccaccacc

SEQ ID NO: 1894988 - DNA, 15 bp, Homo sapiens
cttcccccaccacca

SEQ ID NO: 1894989 - DNA, 15 bp, Homo sapiens
ttcccccaccaccaa

SEQ ID NO: 1894990 - DNA, 15 bp, Homo sapiens
tcccccaccaccaaa

SEQ ID NO: 1894991 - DNA, 15 bp, Homo sapiens
cccccaccaccaaaa

SEQ ID NO: 1894992 - DNA, 15 bp, Homo sapiens
ccccaccaccaaaac

SEQ ID NO: 1894993 - DNA, 15 bp, Homo sapiens
cccaccaccaaaact

SEQ ID NO: 1894994 - DNA, 15 bp, Homo sapiens
ccaccaccaaaactg

SEQ ID NO: 1894995 - DNA, 15 bp, Homo sapiens
caccaccaaaactgc

SEQ ID NO: 1894996 - DNA, 15 bp, Homo sapiens
accaccaaaactgct

SEQ ID NO: 1894997 - DNA, 15 bp, Homo sapiens
ccaccaaaactgctc

SEQ ID NO: 1894998 - DNA, 15 bp, Homo sapiens
caccaaaactgctcc

SEQ ID NO: 1894999 - DNA, 15 bp, Homo sapiens
accaaaactgctcct

SEQ ID NO: 1895000 - DNA, 15 bp, Homo sapiens
ccaaaactgctcctc

SEQ ID NO: 1895001 - DNA, 15 bp, Homo sapiens
caaaactgctcctcc

SEQ ID NO: 1895002 - DNA, 15 bp, Homo sapiens
aaaactgctcctcct

SEQ ID NO: 1895003 - DNA, 15 bp, Homo sapiens
aaactgctcctcctc

SEQ ID NO: 1895004 - DNA, 15 bp, Homo sapiens
aactgctcctcctcc

SEQ ID NO: 1895005 - DNA, 15 bp, Homo sapiens
actgctcctcctcct

SEQ ID NO: 1895006 - DNA, 15 bp, Homo sapiens
ctgctcctcctcctg

SEQ ID NO: 1895007 - DNA, 15 bp, Homo sapiens
tgctcctcctcctgt

SEQ ID NO: 1895008 - DNA, 15 bp, Homo sapiens
gctcctcctcctgta

SEQ ID NO: 1895009 - DNA, 15 bp, Homo sapiens
ctcctcctcctgtat

SEQ ID NO: 1895010 - DNA, 15 bp, Homo sapiens
tcctcctcctgtatt

SEQ ID NO: 1895011 - DNA, 15 bp, Homo sapiens
cctcctcctgtattc

SEQ ID NO: 1895012 - DNA, 15 bp, Homo sapiens
ctcctcctgtattcc

SEQ ID NO: 1895013 - DNA, 15 bp, Homo sapiens
tcctcctgtattcct

SEQ ID NO: 1895014 - DNA, 15 bp, Homo sapiens
cctcctgtattcctg

SEQ ID NO: 1895015 - DNA, 15 bp, Homo sapiens
ctcctgtattcctga

SEQ ID NO: 1895016 - DNA, 15 bp, Homo sapiens
tcctgtattcctgac

SEQ ID NO: 1895017 - DNA, 15 bp, Homo sapiens
cctgtattcctgacc

SEQ ID NO: 1895018 - DNA, 15 bp, Homo sapiens
ctgtattcctgacct

SEQ ID NO: 1895019 - DNA, 15 bp, Homo sapiens
tgtattcctgacctc

SEQ ID NO: 1895020 - DNA, 15 bp, Homo sapiens
gtattcctgacctcc

SEQ ID NO: 1895021 - DNA, 15 bp, Homo sapiens
tattcctgacctccg

SEQ ID NO: 1895022 - DNA, 15 bp, Homo sapiens
attcctgacctccgc

SEQ ID NO: 1895023 - DNA, 15 bp, Homo sapiens
ttcctgacctccgcc

SEQ ID NO: 1895024 - DNA, 15 bp, Homo sapiens
tcctgacctccgcca

SEQ ID NO: 1895025 - DNA, 15 bp, Homo sapiens
cctgacctccgccat

SEQ ID NO: 1895026 - DNA, 15 bp, Homo sapiens
ctgacctccgccatc

SEQ ID NO: 1895027 - DNA, 15 bp, Homo sapiens
tgacctccgccatcc

SEQ ID NO: 1895028 - DNA, 15 bp, Homo sapiens
gacctccgccatcca

SEQ ID NO: 1895029 - DNA, 15 bp, Homo sapiens
acctccgccatccac

SEQ ID NO: 1895030 - DNA, 15 bp, Homo sapiens
cctccgccatccacc

SEQ ID NO: 1895031 - DNA, 15 bp, Homo sapiens
ctccgccatccaccc

SEQ ID NO: 1895032 - DNA, 15 bp, Homo sapiens
tccgccatccacccc

SEQ ID NO: 1895033 - DNA, 15 bp, Homo sapiens
ccgccatccaccccg

SEQ ID NO: 1895034 - DNA, 15 bp, Homo sapiens
cgccatccaccccgt

SEQ ID NO: 1895035 - DNA, 15 bp, Homo sapiens
gccatccaccccgtt

SEQ ID NO: 1895036 - DNA, 15 bp, Homo sapiens
ccatccaccccgttg

SEQ ID NO: 1895037 - DNA, 15 bp, Homo sapiens
catccaccccgttgc

SEQ ID NO: 1895038 - DNA, 15 bp, Homo sapiens
atccaccccgttgct

SEQ ID NO: 1895039 - DNA, 15 bp, Homo sapiens
tccaccccgttgctc

SEQ ID NO: 1895040 - DNA, 15 bp, Homo sapiens
ccaccccgttgctca

SEQ ID NO: 1895041 - DNA, 15 bp, Homo sapiens
caccccgttgctcaa

SEQ ID NO: 1895042 - DNA, 15 bp, Homo sapiens
accccgttgctcaag

SEQ ID NO: 1895043 - DNA, 15 bp, Homo sapiens
ccccgttgctcaagc

SEQ ID NO: 1895044 - DNA, 15 bp, Homo sapiens
cccgttgctcaagcc

SEQ ID NO: 1895045 - DNA, 15 bp, Homo sapiens
ccgttgctcaagccg

SEQ ID NO: 1895046 - DNA, 15 bp, Homo sapiens
cgttgctcaagccgg

SEQ ID NO: 1895047 - DNA, 15 bp, Homo sapiens
gttgctcaagccgga

SEQ ID NO: 1895048 - DNA, 15 bp, Homo sapiens
ttgctcaagccggaa

SEQ ID NO: 1895049 - DNA, 15 bp, Homo sapiens
tgctcaagccggaaa

SEQ ID NO: 1895050 - DNA, 15 bp, Homo sapiens
gctcaagccggaaac

SEQ ID NO: 1895051 - DNA, 15 bp, Homo sapiens
ctcaagccggaaact

SEQ ID NO: 1895052 - DNA, 15 bp, Homo sapiens
tcaagccggaaactc

SEQ ID NO: 1895053 - DNA, 15 bp, Homo sapiens
caagccggaaactcg

SEQ ID NO: 1895054 - DNA, 15 bp, Homo sapiens
aagccggaaactcgg

SEQ ID NO: 1895055 - DNA, 15 bp, Homo sapiens
agccggaaactcggc

SEQ ID NO: 1895056 - DNA, 15 bp, Homo sapiens
gccggaaactcggca

SEQ ID NO: 1895057 - DNA, 15 bp, Homo sapiens
ccggaaactcggcag

SEQ ID NO: 1895058 - DNA, 15 bp, Homo sapiens
cggaaactcggcagc

SEQ ID NO: 1895059 - DNA, 15 bp, Homo sapiens
ggaaactcggcagcc

SEQ ID NO: 1895060 - DNA, 15 bp, Homo sapiens
gaaactcggcagccc

SEQ ID NO: 1895061 - DNA, 15 bp, Homo sapiens
aaactcggcagccct

SEQ ID NO: 1895062 - DNA, 15 bp, Homo sapiens
aactcggcagccctt

SEQ ID NO: 1895063 - DNA, 15 bp, Homo sapiens
actcggcagcccttc

SEQ ID NO: 1895064 - DNA, 15 bp, Homo sapiens
ctcggcagcccttcc

SEQ ID NO: 1895065 - DNA, 15 bp, Homo sapiens
tcggcagcccttcca

SEQ ID NO: 1895066 - DNA, 15 bp, Homo sapiens
cggcagcccttccaa

SEQ ID NO: 1895067 - DNA, 15 bp, Homo sapiens
ggcagcccttccaaa

SEQ ID NO: 1895068 - DNA, 15 bp, Homo sapiens
gcagcccttccaaac

SEQ ID NO: 1895069 - DNA, 15 bp, Homo sapiens
cagcccttccaaact

SEQ ID NO: 1895070 - DNA, 15 bp, Homo sapiens
agcccttccaaactc

SEQ ID NO: 1895071 - DNA, 15 bp, Homo sapiens
gcccttccaaactct

SEQ ID NO: 1895072 - DNA, 15 bp, Homo sapiens
cccttccaaactctt

SEQ ID NO: 1895073 - DNA, 15 bp, Homo sapiens
ccttccaaactcttc

SEQ ID NO: 1895074 - DNA, 15 bp, Homo sapiens
cttccaaactcttcc

SEQ ID NO: 1895075 - DNA, 15 bp, Homo sapiens
ttccaaactcttccc

SEQ ID NO: 1895076 - DNA, 15 bp, Homo sapiens
tccaaactcttccct

SEQ ID NO: 1895077 - DNA, 15 bp, Homo sapiens
ccaaactcttccctc

SEQ ID NO: 1895078 - DNA, 15 bp, Homo sapiens
caaactcttccctct

SEQ ID NO: 1895079 - DNA, 15 bp, Homo sapiens
aaactcttccctctc

SEQ ID NO: 1895080 - DNA, 15 bp, Homo sapiens
aactcttccctctct

SEQ ID NO: 1895081 - DNA, 15 bp, Homo sapiens
actcttccctctctc

SEQ ID NO: 1895082 - DNA, 15 bp, Homo sapiens
ctcttccctctctca

SEQ ID NO: 1895083 - DNA, 15 bp, Homo sapiens
tcttccctctctcac

SEQ ID NO: 1895084 - DNA, 15 bp, Homo sapiens
cttccctctctcact

SEQ ID NO: 1895085 - DNA, 15 bp, Homo sapiens
ttccctctctcactc

SEQ ID NO: 1895086 - DNA, 15 bp, Homo sapiens
tccctctctcactcc

SEQ ID NO: 1895087 - DNA, 15 bp, Homo sapiens
ccctctctcactccc

SEQ ID NO: 1895088 - DNA, 15 bp, Homo sapiens
cctctctcactcccc

SEQ ID NO: 1895089 - DNA, 15 bp, Homo sapiens
ctctctcactcccca

SEQ ID NO: 1895090 - DNA, 15 bp, Homo sapiens
tctctcactccccac

SEQ ID NO: 1895091 - DNA, 15 bp, Homo sapiens
ctctcactccccaca

SEQ ID NO: 1895092 - DNA, 15 bp, Homo sapiens
tctcactccccacat

SEQ ID NO: 1895093 - DNA, 15 bp, Homo sapiens
ctcactccccacatc

SEQ ID NO: 1895094 - DNA, 15 bp, Homo sapiens
tcactccccacatcc

SEQ ID NO: 1895095 - DNA, 15 bp, Homo sapiens
cactccccacatccc

SEQ ID NO: 1895096 - DNA, 15 bp, Homo sapiens
actccccacatccca

SEQ ID NO: 1895097 - DNA, 15 bp, Homo sapiens
ctccccacatcccat

SEQ ID NO: 1895098 - DNA, 15 bp, Homo sapiens
tccccacatcccatc

SEQ ID NO: 1895099 - DNA, 15 bp, Homo sapiens
ccccacatcccatcg

SEQ ID NO: 1895100 - DNA, 15 bp, Homo sapiens
cccacatcccatcgt

SEQ ID NO: 1895101 - DNA, 15 bp, Homo sapiens
ccacatcccatcgtc

SEQ ID NO: 1895102 - DNA, 15 bp, Homo sapiens
cacatcccatcgtct

SEQ ID NO: 1895103 - DNA, 15 bp, Homo sapiens
acatcccatcgtctc

SEQ ID NO: 1895104 - DNA, 15 bp, Homo sapiens
catcccatcgtctcg

SEQ ID NO: 1895105 - DNA, 15 bp, Homo sapiens
atcccatcgtctcgg

SEQ ID NO: 1895106 - DNA, 15 bp, Homo sapiens
tcccatcgtctcggc

SEQ ID NO: 1895107 - DNA, 15 bp, Homo sapiens
cccatcgtctcggcc

SEQ ID NO: 1895108 - DNA, 15 bp, Homo sapiens
ccatcgtctcggcct

SEQ ID NO: 1895109 - DNA, 15 bp, Homo sapiens
catcgtctcggcctt

SEQ ID NO: 1895110 - DNA, 15 bp, Homo sapiens
atcgtctcggccttc

SEQ ID NO: 1895111 - DNA, 15 bp, Homo sapiens
tcgtctcggccttca

SEQ ID NO: 1895112 - DNA, 15 bp, Homo sapiens
cgtctcggccttcac

SEQ ID NO: 1895113 - DNA, 15 bp, Homo sapiens
gtctcggccttcaca

SEQ ID NO: 1895114 - DNA, 15 bp, Homo sapiens
tctcggccttcacaa

SEQ ID NO: 1895115 - DNA, 15 bp, Homo sapiens
ctcggccttcacaat

SEQ ID NO: 1895116 - DNA, 15 bp, Homo sapiens
tcggccttcacaatc

SEQ ID NO: 1895117 - DNA, 15 bp, Homo sapiens
cggccttcacaatct

SEQ ID NO: 1895118 - DNA, 15 bp, Homo sapiens
ggccttcacaatctg

SEQ ID NO: 1895119 - DNA, 15 bp, Homo sapiens
gccttcacaatctgt

SEQ ID NO: 1895120 - DNA, 15 bp, Homo sapiens
ccttcacaatctgtc

SEQ ID NO: 1895121 - DNA, 15 bp, Homo sapiens
cttcacaatctgtca

SEQ ID NO: 1895122 - DNA, 15 bp, Homo sapiens
ttcacaatctgtcag

SEQ ID NO: 1895123 - DNA, 15 bp, Homo sapiens
tcacaatctgtcagt

SEQ ID NO: 1895124 - DNA, 15 bp, Homo sapiens
cacaatctgtcagtt

SEQ ID NO: 1895125 - DNA, 15 bp, Homo sapiens
acaatctgtcagttc

SEQ ID NO: 1895126 - DNA, 15 bp, Homo sapiens
caatctgtcagttct

SEQ ID NO: 1895127 - DNA, 15 bp, Homo sapiens
aatctgtcagttcta

SEQ ID NO: 1895128 - DNA, 15 bp, Homo sapiens
atctgtcagttctaa

SEQ ID NO: 1895129 - DNA, 15 bp, Homo sapiens
tctgtcagttctaac

SEQ ID NO: 1895130 - DNA, 15 bp, Homo sapiens
ctgtcagttctaacc

SEQ ID NO: 1895131 - DNA, 15 bp, Homo sapiens
tgtcagttctaacct

SEQ ID NO: 1895132 - DNA, 15 bp, Homo sapiens
gtcagttctaacctc

SEQ ID NO: 1895133 - DNA, 15 bp, Homo sapiens
tcagttctaacctcc

SEQ ID NO: 1895134 - DNA, 15 bp, Homo sapiens
cagttctaacctcct

SEQ ID NO: 1895135 - DNA, 15 bp, Homo sapiens
agttctaacctccta

SEQ ID NO: 1895136 - DNA, 15 bp, Homo sapiens
gttctaacctcctaa

SEQ ID NO: 1895137 - DNA, 15 bp, Homo sapiens
ttctaacctcctaag

SEQ ID NO: 1895138 - DNA, 15 bp, Homo sapiens
tctaacctcctaagc

SEQ ID NO: 1895139 - DNA, 15 bp, Homo sapiens
ctaacctcctaagca

SEQ ID NO: 1895140 - DNA, 15 bp, Homo sapiens
taacctcctaagcaa

SEQ ID NO: 1895141 - DNA, 15 bp, Homo sapiens
aacctcctaagcaac

SEQ ID NO: 1895142 - DNA, 15 bp, Homo sapiens
acctcctaagcaact

SEQ ID NO: 1895143 - DNA, 15 bp, Homo sapiens
cctcctaagcaacta

SEQ ID NO: 1895144 - DNA, 15 bp, Homo sapiens
ctcctaagcaactag

SEQ ID NO: 1895145 - DNA, 15 bp, Homo sapiens
tcctaagcaactagg

SEQ ID NO: 1895146 - DNA, 15 bp, Homo sapiens
cctaagcaactaggc

SEQ ID NO: 1895147 - DNA, 15 bp, Homo sapiens
ctaagcaactaggcc

SEQ ID NO: 1895148 - DNA, 15 bp, Homo sapiens
taagcaactaggcct

SEQ ID NO: 1895149 - DNA, 15 bp, Homo sapiens
aagcaactaggcctt

SEQ ID NO: 1895150 - DNA, 15 bp, Homo sapiens
agcaactaggccttc

SEQ ID NO: 1895151 - DNA, 15 bp, Homo sapiens
gcaactaggccttca

SEQ ID NO: 1895152 - DNA, 15 bp, Homo sapiens
caactaggccttcag

SEQ ID NO: 1895153 - DNA, 15 bp, Homo sapiens
aactaggccttcagt

SEQ ID NO: 1895154 - DNA, 15 bp, Homo sapiens
actaggccttcagta

SEQ ID NO: 1895155 - DNA, 15 bp, Homo sapiens
ctaggccttcagtaa

SEQ ID NO: 1895156 - DNA, 15 bp, Homo sapiens
taggccttcagtaaa

SEQ ID NO: 1895157 - DNA, 15 bp, Homo sapiens
aggccttcagtaaat

SEQ ID NO: 1895158 - DNA, 15 bp, Homo sapiens
ggccttcagtaaatg

SEQ ID NO: 1895159 - DNA, 15 bp, Homo sapiens
gccttcagtaaatgt

SEQ ID NO: 1895160 - DNA, 15 bp, Homo sapiens
ccttcagtaaatgtg

SEQ ID NO: 1895161 - DNA, 15 bp, Homo sapiens
cttcagtaaatgtga

SEQ ID NO: 1895162 - DNA, 15 bp, Homo sapiens
ttcagtaaatgtgat

SEQ ID NO: 1895163 - DNA, 15 bp, Homo sapiens
tcagtaaatgtgatt

SEQ ID NO: 1895164 - DNA, 15 bp, Homo sapiens
cagtaaatgtgattc

SEQ ID NO: 1895165 - DNA, 15 bp, Homo sapiens
agtaaatgtgattca

SEQ ID NO: 1895166 - DNA, 15 bp, Homo sapiens
gtaaatgtgattcac

SEQ ID NO: 1895167 - DNA, 15 bp, Homo sapiens
taaatgtgattcacc

SEQ ID NO: 1895168 - DNA, 15 bp, Homo sapiens
aaatgtgattcacct

SEQ ID NO: 1895169 - DNA, 15 bp, Homo sapiens
aatgtgattcacctc

SEQ ID NO: 1895170 - DNA, 15 bp, Homo sapiens
atgtgattcacctct

SEQ ID NO: 1895171 - DNA, 15 bp, Homo sapiens
tgtgattcacctctt

SEQ ID NO: 1895172 - DNA, 15 bp, Homo sapiens
gtgattcacctcttc

SEQ ID NO: 1895173 - DNA, 15 bp, Homo sapiens
tgattcacctcttct

SEQ ID NO: 1895174 - DNA, 15 bp, Homo sapiens
gattcacctcttctt

SEQ ID NO: 1895175 - DNA, 15 bp, Homo sapiens
attcacctcttcttt

SEQ ID NO: 1895176 - DNA, 15 bp, Homo sapiens
ttcacctcttctttc

SEQ ID NO: 1895177 - DNA, 15 bp, Homo sapiens
tcacctcttctttcc

SEQ ID NO: 1895178 - DNA, 15 bp, Homo sapiens
cacctcttctttccc

SEQ ID NO: 1895179 - DNA, 15 bp, Homo sapiens
acctcttctttccct

SEQ ID NO: 1895180 - DNA, 15 bp, Homo sapiens
cctcttctttccctc

SEQ ID NO: 1895181 - DNA, 15 bp, Homo sapiens
ctcttctttccctcc

SEQ ID NO: 1895182 - DNA, 15 bp, Homo sapiens
tcttctttccctcct

SEQ ID NO: 1895183 - DNA, 15 bp, Homo sapiens
cttctttccctcctt

SEQ ID NO: 1895184 - DNA, 15 bp, Homo sapiens
ttctttccctccttt

SEQ ID NO: 1895185 - DNA, 15 bp, Homo sapiens
tctttccctcctttt

SEQ ID NO: 1895186 - DNA, 15 bp, Homo sapiens
ctttccctccttttc

SEQ ID NO: 1895187 - DNA, 15 bp, Homo sapiens
tttccctccttttcc

SEQ ID NO: 1895188 - DNA, 15 bp, Homo sapiens
ttccctccttttccc

SEQ ID NO: 1895189 - DNA, 15 bp, Homo sapiens
tccctccttttccca

SEQ ID NO: 1895190 - DNA, 15 bp, Homo sapiens
ccctccttttcccaa

SEQ ID NO: 1895191 - DNA, 15 bp, Homo sapiens
cctccttttcccaaa

SEQ ID NO: 1895192 - DNA, 15 bp, Homo sapiens
ctccttttcccaaag

SEQ ID NO: 1895193 - DNA, 15 bp, Homo sapiens
tccttttcccaaagc

SEQ ID NO: 1895194 - DNA, 15 bp, Homo sapiens
ccttttcccaaagca

SEQ ID NO: 1895195 - DNA, 15 bp, Homo sapiens
cttttcccaaagcat

SEQ ID NO: 1895196 - DNA, 15 bp, Homo sapiens
ttttcccaaagcatc

SEQ ID NO: 1895197 - DNA, 15 bp, Homo sapiens
ttcccaaagcatccc

SEQ ID NO: 1895198 - DNA, 15 bp, Homo sapiens
tcccaaagcatccct

SEQ ID NO: 1895199 - DNA, 15 bp, Homo sapiens
cccaaagcatccctc

SEQ ID NO: 1895200 - DNA, 15 bp, Homo sapiens
ccaaagcatccctct

SEQ ID NO: 1895201 - DNA, 15 bp, Homo sapiens
caaagcatccctctt

SEQ ID NO: 1895202 - DNA, 15 bp, Homo sapiens
aaagcatccctctta

SEQ ID NO: 1895203 - DNA, 15 bp, Homo sapiens
aagcatccctcttag

SEQ ID NO: 1895204 - DNA, 15 bp, Homo sapiens
agcatccctcttagt

SEQ ID NO: 1895205 - DNA, 15 bp, Homo sapiens
gcatccctcttagtc

SEQ ID NO: 1895206 - DNA, 15 bp, Homo sapiens
catccctcttagtct

SEQ ID NO: 1895207 - DNA, 15 bp, Homo sapiens
atccctcttagtcta

SEQ ID NO: 1895208 - DNA, 15 bp, Homo sapiens
tccctcttagtctag

SEQ ID NO: 1895209 - DNA, 15 bp, Homo sapiens
ccctcttagtctagg

SEQ ID NO: 1895210 - DNA, 15 bp, Homo sapiens
cctcttagtctaggt

SEQ ID NO: 1895211 - DNA, 15 bp, Homo sapiens
ctcttagtctaggtc

SEQ ID NO: 1895212 - DNA, 15 bp, Homo sapiens
tcttagtctaggtcc

SEQ ID NO: 1895213 - DNA, 15 bp, Homo sapiens
cttagtctaggtcct

SEQ ID NO: 1895214 - DNA, 15 bp, Homo sapiens
ttagtctaggtcctt

SEQ ID NO: 1895215 - DNA, 15 bp, Homo sapiens
tagtctaggtccttg

SEQ ID NO: 1895216 - DNA, 15 bp, Homo sapiens
agtctaggtccttgt

SEQ ID NO: 1895217 - DNA, 15 bp, Homo sapiens
gtctaggtccttgtt

SEQ ID NO: 1895218 - DNA, 15 bp, Homo sapiens
tctaggtccttgttg

SEQ ID NO: 1895219 - DNA, 15 bp, Homo sapiens
ctaggtccttgttgt

SEQ ID NO: 1895220 - DNA, 15 bp, Homo sapiens
taggtccttgttgtt

SEQ ID NO: 1895221 - DNA, 15 bp, Homo sapiens
aggtccttgttgttt

SEQ ID NO: 1895222 - DNA, 15 bp, Homo sapiens
ggtccttgttgtttc

SEQ ID NO: 1895223 - DNA, 15 bp, Homo sapiens
gtccttgttgtttct

SEQ ID NO: 1895224 - DNA, 15 bp, Homo sapiens
tccttgttgtttctt

SEQ ID NO: 1895225 - DNA, 15 bp, Homo sapiens
ccttgttgtttcttg

SEQ ID NO: 1895226 - DNA, 15 bp, Homo sapiens
cttgttgtttcttgc

SEQ ID NO: 1895227 - DNA, 15 bp, Homo sapiens
ttgttgtttcttgcc

SEQ ID NO: 1895228 - DNA, 15 bp, Homo sapiens
tgttgtttcttgcct

SEQ ID NO: 1895229 - DNA, 15 bp, Homo sapiens
gttgtttcttgcctg

SEQ ID NO: 1895230 - DNA, 15 bp, Homo sapiens
ttgtttcttgcctga

SEQ ID NO: 1895231 - DNA, 15 bp, Homo sapiens
tgtttcttgcctgaa

SEQ ID NO: 1895232 - DNA, 15 bp, Homo sapiens
gtttcttgcctgaac

SEQ ID NO: 1895233 - DNA, 15 bp, Homo sapiens
tttcttgcctgaact

SEQ ID NO: 1895234 - DNA, 15 bp, Homo sapiens
ttcttgcctgaactc

SEQ ID NO: 1895235 - DNA, 15 bp, Homo sapiens
tcttgcctgaactcc

SEQ ID NO: 1895236 - DNA, 15 bp, Homo sapiens
cttgcctgaactcct

SEQ ID NO: 1895237 - DNA, 15 bp, Homo sapiens
ttgcctgaactcctg

SEQ ID NO: 1895238 - DNA, 15 bp, Homo sapiens
tgcctgaactcctgc

SEQ ID NO: 1895239 - DNA, 15 bp, Homo sapiens
gcctgaactcctgcc

SEQ ID NO: 1895240 - DNA, 15 bp, Homo sapiens
cctgaactcctgcca

SEQ ID NO: 1895241 - DNA, 15 bp, Homo sapiens
ctgaactcctgccat

SEQ ID NO: 1895242 - DNA, 15 bp, Homo sapiens
tgaactcctgccata

SEQ ID NO: 1895243 - DNA, 15 bp, Homo sapiens
gaactcctgccatag

SEQ ID NO: 1895244 - DNA, 15 bp, Homo sapiens
aactcctgccatagt

SEQ ID NO: 1895245 - DNA, 15 bp, Homo sapiens
actcctgccatagtc

SEQ ID NO: 1895246 - DNA, 15 bp, Homo sapiens
ctcctgccatagtct

SEQ ID NO: 1895247 - DNA, 15 bp, Homo sapiens
tcctgccatagtctt

SEQ ID NO: 1895248 - DNA, 15 bp, Homo sapiens
cctgccatagtctta

SEQ ID NO: 1895249 - DNA, 15 bp, Homo sapiens
ctgccatagtcttaa

SEQ ID NO: 1895250 - DNA, 15 bp, Homo sapiens
tgccatagtcttaac

SEQ ID NO: 1895251 - DNA, 15 bp, Homo sapiens
gccatagtcttaact

SEQ ID NO: 1895252 - DNA, 15 bp, Homo sapiens
ccatagtcttaactg

SEQ ID NO: 1895253 - DNA, 15 bp, Homo sapiens
catagtcttaactgg

SEQ ID NO: 1895254 - DNA, 15 bp, Homo sapiens
atagtcttaactggt

SEQ ID NO: 1895255 - DNA, 15 bp, Homo sapiens
tagtcttaactggtc

SEQ ID NO: 1895256 - DNA, 15 bp, Homo sapiens
agtcttaactggtct

SEQ ID NO: 1895257 - DNA, 15 bp, Homo sapiens
gtcttaactggtctc

SEQ ID NO: 1895258 - DNA, 15 bp, Homo sapiens
tcttaactggtctcc

SEQ ID NO: 1895259 - DNA, 15 bp, Homo sapiens
cttaactggtctcct

SEQ ID NO: 1895260 - DNA, 15 bp, Homo sapiens
ttaactggtctcctt

SEQ ID NO: 1895261 - DNA, 15 bp, Homo sapiens
taactggtctccttg

SEQ ID NO: 1895262 - DNA, 15 bp, Homo sapiens
aactggtctccttgc

SEQ ID NO: 1895263 - DNA, 15 bp, Homo sapiens
actggtctccttgct

SEQ ID NO: 1895264 - DNA, 15 bp, Homo sapiens
ctggtctccttgctt

SEQ ID NO: 1895265 - DNA, 15 bp, Homo sapiens
tggtctccttgcttc

SEQ ID NO: 1895266 - DNA, 15 bp, Homo sapiens
ggtctccttgcttcc

SEQ ID NO: 1895267 - DNA, 15 bp, Homo sapiens
gtctccttgcttcct

SEQ ID NO: 1895268 - DNA, 15 bp, Homo sapiens
tctccttgcttcctg

SEQ ID NO: 1895269 - DNA, 15 bp, Homo sapiens
ctccttgcttcctgt

SEQ ID NO: 1895270 - DNA, 15 bp, Homo sapiens
tccttgcttcctgtc

SEQ ID NO: 1895271 - DNA, 15 bp, Homo sapiens
ccttgcttcctgtct

SEQ ID NO: 1895272 - DNA, 15 bp, Homo sapiens
cttgcttcctgtctt

SEQ ID NO: 1895273 - DNA, 15 bp, Homo sapiens
ttgcttcctgtctta

SEQ ID NO: 1895274 - DNA, 15 bp, Homo sapiens
tgcttcctgtcttat

SEQ ID NO: 1895275 - DNA, 15 bp, Homo sapiens
gcttcctgtcttatc

SEQ ID NO: 1895276 - DNA, 15 bp, Homo sapiens
cttcctgtcttatcc

SEQ ID NO: 1895277 - DNA, 15 bp, Homo sapiens
ttcctgtcttatcct

SEQ ID NO: 1895278 - DNA, 15 bp, Homo sapiens
tcctgtcttatcctc

SEQ ID NO: 1895279 - DNA, 15 bp, Homo sapiens
cctgtcttatcctcc

SEQ ID NO: 1895280 - DNA, 15 bp, Homo sapiens
ctgtcttatcctcca

SEQ ID NO: 1895281 - DNA, 15 bp, Homo sapiens
tgtcttatcctccac

SEQ ID NO: 1895282 - DNA, 15 bp, Homo sapiens
gtcttatcctccacc

SEQ ID NO: 1895283 - DNA, 15 bp, Homo sapiens
tcttatcctccaccg

SEQ ID NO: 1895284 - DNA, 15 bp, Homo sapiens
cttatcctccaccgt

SEQ ID NO: 1895285 - DNA, 15 bp, Homo sapiens
ttatcctccaccgtc

SEQ ID NO: 1895286 - DNA, 15 bp, Homo sapiens
tatcctccaccgtct

SEQ ID NO: 1895287 - DNA, 15 bp, Homo sapiens
atcctccaccgtctt

SEQ ID NO: 1895288 - DNA, 15 bp, Homo sapiens
tcctccaccgtcttt

SEQ ID NO: 1895289 - DNA, 15 bp, Homo sapiens
cctccaccgtctttc

SEQ ID NO: 1895290 - DNA, 15 bp, Homo sapiens
ctccaccgtctttct

SEQ ID NO: 1895291 - DNA, 15 bp, Homo sapiens
tccaccgtctttctt

SEQ ID NO: 1895292 - DNA, 15 bp, Homo sapiens
ccaccgtctttcttt

SEQ ID NO: 1895293 - DNA, 15 bp, Homo sapiens
caccgtctttctttt

SEQ ID NO: 1895294 - DNA, 15 bp, Homo sapiens
accgtctttctttta

SEQ ID NO: 1895295 - DNA, 15 bp, Homo sapiens
ccgtctttcttttat

SEQ ID NO: 1895296 - DNA, 15 bp, Homo sapiens
cgtctttcttttata

SEQ ID NO: 1895297 - DNA, 15 bp, Homo sapiens
gtctttcttttatac

SEQ ID NO: 1895298 - DNA, 15 bp, Homo sapiens
tctttcttttatact

SEQ ID NO: 1895299 - DNA, 15 bp, Homo sapiens
ctttcttttatactg

SEQ ID NO: 1895300 - DNA, 15 bp, Homo sapiens
tttcttttatactga

SEQ ID NO: 1895301 - DNA, 15 bp, Homo sapiens
ttcttttatactgac

SEQ ID NO: 1895302 - DNA, 15 bp, Homo sapiens
tcttttatactgaca

SEQ ID NO: 1895303 - DNA, 15 bp, Homo sapiens
cttttatactgacac

SEQ ID NO: 1895304 - DNA, 15 bp, Homo sapiens
ttttatactgacaca

SEQ ID NO: 1895305 - DNA, 15 bp, Homo sapiens
tttatactgacacaa

SEQ ID NO: 1895306 - DNA, 15 bp, Homo sapiens
ttatactgacacaag

SEQ ID NO: 1895307 - DNA, 15 bp, Homo sapiens
tatactgacacaaga

SEQ ID NO: 1895308 - DNA, 15 bp, Homo sapiens
atactgacacaagaa

SEQ ID NO: 1895309 - DNA, 15 bp, Homo sapiens
tactgacacaagaat

SEQ ID NO: 1895310 - DNA, 15 bp, Homo sapiens
actgacacaagaatg

SEQ ID NO: 1895311 - DNA, 15 bp, Homo sapiens
ctgacacaagaatgg

SEQ ID NO: 1895312 - DNA, 15 bp, Homo sapiens
tgacacaagaatggt

SEQ ID NO: 1895313 - DNA, 15 bp, Homo sapiens
gacacaagaatggtc

SEQ ID NO: 1895314 - DNA, 15 bp, Homo sapiens
acacaagaatggtct

SEQ ID NO: 1895315 - DNA, 15 bp, Homo sapiens
cacaagaatggtctt

SEQ ID NO: 1895316 - DNA, 15 bp, Homo sapiens
acaagaatggtcttt

SEQ ID NO: 1895317 - DNA, 15 bp, Homo sapiens
caagaatggtctttc

SEQ ID NO: 1895318 - DNA, 15 bp, Homo sapiens
aagaatggtctttct

SEQ ID NO: 1895319 - DNA, 15 bp, Homo sapiens
agaatggtctttctg

SEQ ID NO: 1895320 - DNA, 15 bp, Homo sapiens
gaatggtctttctga

SEQ ID NO: 1895321 - DNA, 15 bp, Homo sapiens
aatggtctttctgaa

SEQ ID NO: 1895322 - DNA, 15 bp, Homo sapiens
atggtctttctgaat

SEQ ID NO: 1895323 - DNA, 15 bp, Homo sapiens
tggtctttctgaatt

SEQ ID NO: 1895324 - DNA, 15 bp, Homo sapiens
ggtctttctgaattg

SEQ ID NO: 1895325 - DNA, 15 bp, Homo sapiens
gtctttctgaattgc

SEQ ID NO: 1895326 - DNA, 15 bp, Homo sapiens
tctttctgaattgca

SEQ ID NO: 1895327 - DNA, 15 bp, Homo sapiens
ctttctgaattgcac

SEQ ID NO: 1895328 - DNA, 15 bp, Homo sapiens
tttctgaattgcaca

SEQ ID NO: 1895329 - DNA, 15 bp, Homo sapiens
ttctgaattgcacat

SEQ ID NO: 1895330 - DNA, 15 bp, Homo sapiens
tctgaattgcacatg

SEQ ID NO: 1895331 - DNA, 15 bp, Homo sapiens
ctgaattgcacatgt

SEQ ID NO: 1895332 - DNA, 15 bp, Homo sapiens
tgaattgcacatgtg

SEQ ID NO: 1895333 - DNA, 15 bp, Homo sapiens
gaattgcacatgtga

SEQ ID NO: 1895334 - DNA, 15 bp, Homo sapiens
aattgcacatgtgag

SEQ ID NO: 1895335 - DNA, 15 bp, Homo sapiens
attgcacatgtgagc

SEQ ID NO: 1895336 - DNA, 15 bp, Homo sapiens
ttgcacatgtgagca

SEQ ID NO: 1895337 - DNA, 15 bp, Homo sapiens
tgcacatgtgagcat

SEQ ID NO: 1895338 - DNA, 15 bp, Homo sapiens
gagttgaaagggacc

SEQ ID NO: 1895339 - DNA, 15 bp, Homo sapiens
agttgaaagggacct

SEQ ID NO: 1895340 - DNA, 15 bp, Homo sapiens
gttgaaagggacctg

SEQ ID NO: 1895341 - DNA, 15 bp, Homo sapiens
ttgaaagggacctga

SEQ ID NO: 1895342 - DNA, 15 bp, Homo sapiens
tgaaagggacctgaa

SEQ ID NO: 1895343 - DNA, 15 bp, Homo sapiens
gaaagggacctgaag

SEQ ID NO: 1895344 - DNA, 15 bp, Homo sapiens
aaagggacctgaagc

SEQ ID NO: 1895345 - DNA, 15 bp, Homo sapiens
aagggacctgaagca

SEQ ID NO: 1895346 - DNA, 15 bp, Homo sapiens
agggacctgaagcaa

SEQ ID NO: 1895347 - DNA, 15 bp, Homo sapiens
gggacctgaagcaaa

SEQ ID NO: 1895348 - DNA, 15 bp, Homo sapiens
ggacctgaagcaaat

SEQ ID NO: 1895349 - DNA, 15 bp, Homo sapiens
gacctgaagcaaatt

SEQ ID NO: 1895350 - DNA, 15 bp, Homo sapiens
acctgaagcaaattg

SEQ ID NO: 1895351 - DNA, 15 bp, Homo sapiens
cctgaagcaaattgc

SEQ ID NO: 1895352 - DNA, 15 bp, Homo sapiens
ctgaagcaaattgcc

SEQ ID NO: 1895353 - DNA, 15 bp, Homo sapiens
tgaagcaaattgcct

SEQ ID NO: 1895354 - DNA, 15 bp, Homo sapiens
gaagcaaattgcctt

SEQ ID NO: 1895355 - DNA, 15 bp, Homo sapiens
aagcaaattgccttt

SEQ ID NO: 1895356 - DNA, 15 bp, Homo sapiens
agcaaattgccttta

SEQ ID NO: 1895357 - DNA, 15 bp, Homo sapiens
gcaaattgcctttaa

SEQ ID NO: 1895358 - DNA, 15 bp, Homo sapiens
caaattgcctttaat

SEQ ID NO: 1895359 - DNA, 15 bp, Homo sapiens
aaattgcctttaata

SEQ ID NO: 1895360 - DNA, 15 bp, Homo sapiens
aattgcctttaatag

SEQ ID NO: 1895361 - DNA, 15 bp, Homo sapiens
attgcctttaatagc

SEQ ID NO: 1895362 - DNA, 15 bp, Homo sapiens
ttgcctttaatagca

SEQ ID NO: 1895363 - DNA, 15 bp, Homo sapiens
tgcctttaatagcaa

SEQ ID NO: 1895364 - DNA, 15 bp, Homo sapiens
gcctttaatagcaac

SEQ ID NO: 1895365 - DNA, 15 bp, Homo sapiens
cctttaatagcaacc

SEQ ID NO: 1895366 - DNA, 15 bp, Homo sapiens
ctttaatagcaaccc

SEQ ID NO: 1895367 - DNA, 15 bp, Homo sapiens
tttaatagcaaccct

SEQ ID NO: 1895368 - DNA, 15 bp, Homo sapiens
ttaatagcaaccctg

SEQ ID NO: 1895369 - DNA, 15 bp, Homo sapiens
taatagcaaccctga

SEQ ID NO: 1895370 - DNA, 15 bp, Homo sapiens
aatagcaaccctgag

SEQ ID NO: 1895371 - DNA, 15 bp, Homo sapiens
atagcaaccctgagt

SEQ ID NO: 1895372 - DNA, 15 bp, Homo sapiens
tagcaaccctgagtg

SEQ ID NO: 1895373 - DNA, 15 bp, Homo sapiens
agcaaccctgagtgg

SEQ ID NO: 1895374 - DNA, 15 bp, Homo sapiens
gcaaccctgagtgga

SEQ ID NO: 1895375 - DNA, 15 bp, Homo sapiens
caaccctgagtggag

SEQ ID NO: 1895376 - DNA, 15 bp, Homo sapiens
aaccctgagtggagg

SEQ ID NO: 1895377 - DNA, 15 bp, Homo sapiens
accctgagtggaggt

SEQ ID NO: 1895378 - DNA, 15 bp, Homo sapiens
ccctgagtggaggtc

SEQ ID NO: 1895379 - DNA, 15 bp, Homo sapiens
cctgagtggaggtca

SEQ ID NO: 1895380 - DNA, 15 bp, Homo sapiens
ctgagtggaggtcac

SEQ ID NO: 1895381 - DNA, 15 bp, Homo sapiens
tgagtggaggtcacc

SEQ ID NO: 1895382 - DNA, 15 bp, Homo sapiens
gagtggaggtcacct

SEQ ID NO: 1895383 - DNA, 15 bp, Homo sapiens
agtggaggtcaccta

SEQ ID NO: 1895384 - DNA, 15 bp, Homo sapiens
gtggaggtcacctag

SEQ ID NO: 1895385 - DNA, 15 bp, Homo sapiens
tggaggtcacctaga

SEQ ID NO: 1895386 - DNA, 15 bp, Homo sapiens
ggaggtcacctagac

SEQ ID NO: 1895387 - DNA, 15 bp, Homo sapiens
gaggtcacctagact

SEQ ID NO: 1895388 - DNA, 15 bp, Homo sapiens
aggtcacctagactc

SEQ ID NO: 1895389 - DNA, 15 bp, Homo sapiens
ggtcacctagactca

SEQ ID NO: 1895390 - DNA, 15 bp, Homo sapiens
gtcacctagactcat

SEQ ID NO: 1895391 - DNA, 15 bp, Homo sapiens
tcacctagactcatc

SEQ ID NO: 1895392 - DNA, 15 bp, Homo sapiens
cacctagactcatct

SEQ ID NO: 1895393 - DNA, 15 bp, Homo sapiens
acctagactcatctt

SEQ ID NO: 1895394 - DNA, 15 bp, Homo sapiens
cctagactcatcttg

SEQ ID NO: 1895395 - DNA, 15 bp, Homo sapiens
ctagactcatcttga

SEQ ID NO: 1895396 - DNA, 15 bp, Homo sapiens
tagactcatcttgaa

SEQ ID NO: 1895397 - DNA, 15 bp, Homo sapiens
agactcatcttgaat

SEQ ID NO: 1895398 - DNA, 15 bp, Homo sapiens
gactcatcttgaata

SEQ ID NO: 1895399 - DNA, 15 bp, Homo sapiens
actcatcttgaatac

SEQ ID NO: 1895400 - DNA, 15 bp, Homo sapiens
ctcatcttgaatact

SEQ ID NO: 1895401 - DNA, 15 bp, Homo sapiens
tcatcttgaatactt

SEQ ID NO: 1895402 - DNA, 15 bp, Homo sapiens
catcttgaatacttt

SEQ ID NO: 1895403 - DNA, 15 bp, Homo sapiens
atcttgaatactttc

SEQ ID NO: 1895404 - DNA, 15 bp, Homo sapiens
tcttgaatactttca

SEQ ID NO: 1895405 - DNA, 15 bp, Homo sapiens
cttgaatactttcag

SEQ ID NO: 1895406 - DNA, 15 bp, Homo sapiens
ttgaatactttcagt

SEQ ID NO: 1895407 - DNA, 15 bp, Homo sapiens
tgaatactttcagtg

SEQ ID NO: 1895408 - DNA, 15 bp, Homo sapiens
gaatactttcagtga

SEQ ID NO: 1895409 - DNA, 15 bp, Homo sapiens
aatactttcagtgat

SEQ ID NO: 1895410 - DNA, 15 bp, Homo sapiens
atactttcagtgatg

SEQ ID NO: 1895411 - DNA, 15 bp, Homo sapiens
tactttcagtgatgg

SEQ ID NO: 1895412 - DNA, 15 bp, Homo sapiens
actttcagtgatggg

SEQ ID NO: 1895413 - DNA, 15 bp, Homo sapiens
ctttcagtgatgggg

SEQ ID NO: 1895414 - DNA, 15 bp, Homo sapiens
tttcagtgatggggc

SEQ ID NO: 1895415 - DNA, 15 bp, Homo sapiens
ttcagtgatggggca

SEQ ID NO: 1895416 - DNA, 15 bp, Homo sapiens
tcagtgatggggcac

SEQ ID NO: 1895417 - DNA, 15 bp, Homo sapiens
cagtgatggggcact

SEQ ID NO: 1895418 - DNA, 15 bp, Homo sapiens
agtgatggggcactc

SEQ ID NO: 1895419 - DNA, 15 bp, Homo sapiens
gtgatggggcactca

SEQ ID NO: 1895420 - DNA, 15 bp, Homo sapiens
tgatggggcactcac

SEQ ID NO: 1895421 - DNA, 15 bp, Homo sapiens
gatggggcactcaca

SEQ ID NO: 1895422 - DNA, 15 bp, Homo sapiens
atggggcactcacat

SEQ ID NO: 1895423 - DNA, 15 bp, Homo sapiens
tggggcactcacata

SEQ ID NO: 1895424 - DNA, 15 bp, Homo sapiens
ggggcactcacatat

SEQ ID NO: 1895425 - DNA, 15 bp, Homo sapiens
gggcactcacatatt

SEQ ID NO: 1895426 - DNA, 15 bp, Homo sapiens
ggcactcacatattt

SEQ ID NO: 1895427 - DNA, 15 bp, Homo sapiens
gcactcacatattta

SEQ ID NO: 1895428 - DNA, 15 bp, Homo sapiens
cactcacatatttat

SEQ ID NO: 1895429 - DNA, 15 bp, Homo sapiens
actcacatatttata

SEQ ID NO: 1895430 - DNA, 15 bp, Homo sapiens
ctcacatatttataa

SEQ ID NO: 1895431 - DNA, 15 bp, Homo sapiens
tcacatatttataaa

SEQ ID NO: 1895432 - DNA, 15 bp, Homo sapiens
cacatatttataaac

SEQ ID NO: 1895433 - DNA, 15 bp, Homo sapiens
acatatttataaaca

SEQ ID NO: 1895434 - DNA, 15 bp, Homo sapiens
catatttataaacat

SEQ ID NO: 1895435 - DNA, 15 bp, Homo sapiens
atatttataaacatc

SEQ ID NO: 1895436 - DNA, 15 bp, Homo sapiens
tatttataaacatca

SEQ ID NO: 1895437 - DNA, 15 bp, Homo sapiens
atttataaacatcaa

SEQ ID NO: 1895438 - DNA, 15 bp, Homo sapiens
tttataaacatcaaa

SEQ ID NO: 1895439 - DNA, 15 bp, Homo sapiens
ttataaacatcaaag

SEQ ID NO: 1895440 - DNA, 15 bp, Homo sapiens
tataaacatcaaagc

SEQ ID NO: 1895441 - DNA, 15 bp, Homo sapiens
ataaacatcaaagcc

SEQ ID NO: 1895442 - DNA, 15 bp, Homo sapiens
taaacatcaaagccc

SEQ ID NO: 1895443 - DNA, 15 bp, Homo sapiens
aaacatcaaagccca

SEQ ID NO: 1895444 - DNA, 15 bp, Homo sapiens
aacatcaaagcccat

SEQ ID NO: 1895445 - DNA, 15 bp, Homo sapiens
acatcaaagcccatt

SEQ ID NO: 1895446 - DNA, 15 bp, Homo sapiens
catcaaagcccattt

SEQ ID NO: 1895447 - DNA, 15 bp, Homo sapiens
atcaaagcccatttg

SEQ ID NO: 1895448 - DNA, 15 bp, Homo sapiens
tcaaagcccatttga

SEQ ID NO: 1895449 - DNA, 15 bp, Homo sapiens
caaagcccatttgat

SEQ ID NO: 1895450 - DNA, 15 bp, Homo sapiens
aaagcccatttgatt

SEQ ID NO: 1895451 - DNA, 15 bp, Homo sapiens
aagcccatttgatta

SEQ ID NO: 1895452 - DNA, 15 bp, Homo sapiens
agcccatttgattat

SEQ ID NO: 1895453 - DNA, 15 bp, Homo sapiens
gcccatttgattatt

SEQ ID NO: 1895454 - DNA, 15 bp, Homo sapiens
cccatttgattattg

SEQ ID NO: 1895455 - DNA, 15 bp, Homo sapiens
ccatttgattattgg

SEQ ID NO: 1895456 - DNA, 15 bp, Homo sapiens
catttgattattgga

SEQ ID NO: 1895457 - DNA, 15 bp, Homo sapiens
atttgattattggat

SEQ ID NO: 1895458 - DNA, 15 bp, Homo sapiens
tttgattattggatg

SEQ ID NO: 1895459 - DNA, 15 bp, Homo sapiens
ttgattattggatga

SEQ ID NO: 1895460 - DNA, 15 bp, Homo sapiens
tgattattggatgac

SEQ ID NO: 1895461 - DNA, 15 bp, Homo sapiens
gattattggatgact

SEQ ID NO: 1895462 - DNA, 15 bp, Homo sapiens
attattggatgactc

SEQ ID NO: 1895463 - DNA, 15 bp, Homo sapiens
ttattggatgactca

SEQ ID NO: 1895464 - DNA, 15 bp, Homo sapiens
tattggatgactcag

SEQ ID NO: 1895465 - DNA, 15 bp, Homo sapiens
attggatgactcaga

SEQ ID NO: 1895466 - DNA, 15 bp, Homo sapiens
ttggatgactcagaa

SEQ ID NO: 1895467 - DNA, 15 bp, Homo sapiens
tggatgactcagaac

SEQ ID NO: 1895468 - DNA, 15 bp, Homo sapiens
ggatgactcagaact

SEQ ID NO: 1895469 - DNA, 15 bp, Homo sapiens
gatgactcagaactt

SEQ ID NO: 1895470 - DNA, 15 bp, Homo sapiens
atgactcagaacttt

SEQ ID NO: 1895471 - DNA, 15 bp, Homo sapiens
tgactcagaactttt

SEQ ID NO: 1895472 - DNA, 15 bp, Homo sapiens
gactcagaacttttc

SEQ ID NO: 1895473 - DNA, 15 bp, Homo sapiens
actcagaacttttcc

SEQ ID NO: 1895474 - DNA, 15 bp, Homo sapiens
ctcagaacttttcct

SEQ ID NO: 1895475 - DNA, 15 bp, Homo sapiens
tcagaacttttcctt

SEQ ID NO: 1895476 - DNA, 15 bp, Homo sapiens
cagaacttttccttg

SEQ ID NO: 1895477 - DNA, 15 bp, Homo sapiens
agaacttttccttgt

SEQ ID NO: 1895478 - DNA, 15 bp, Homo sapiens
gaacttttccttgta

SEQ ID NO: 1895479 - DNA, 15 bp, Homo sapiens
aacttttccttgtac

SEQ ID NO: 1895480 - DNA, 15 bp, Homo sapiens
cttttccttgtactg

SEQ ID NO: 1895481 - DNA, 15 bp, Homo sapiens
ttttccttgtactgt

SEQ ID NO: 1895482 - DNA, 15 bp, Homo sapiens
tttccttgtactgta

SEQ ID NO: 1895483 - DNA, 15 bp, Homo sapiens
ttccttgtactgtaa

SEQ ID NO: 1895484 - DNA, 15 bp, Homo sapiens
tccttgtactgtaaa

SEQ ID NO: 1895485 - DNA, 15 bp, Homo sapiens
ccttgtactgtaaaa

SEQ ID NO: 1895486 - DNA, 15 bp, Homo sapiens
cttgtactgtaaaaa

SEQ ID NO: 1895487 - DNA, 15 bp, Homo sapiens
ttgtactgtaaaaat

SEQ ID NO: 1895488 - DNA, 15 bp, Homo sapiens
tgtactgtaaaaatc

SEQ ID NO: 1895489 - DNA, 15 bp, Homo sapiens
gtactgtaaaaatct

SEQ ID NO: 1895490 - DNA, 15 bp, Homo sapiens
tactgtaaaaatctg

SEQ ID NO: 1895491 - DNA, 15 bp, Homo sapiens
actgtaaaaatctgc

SEQ ID NO: 1895492 - DNA, 15 bp, Homo sapiens
ctgtaaaaatctgcc

SEQ ID NO: 1895493 - DNA, 15 bp, Homo sapiens
tgtaaaaatctgcct

SEQ ID NO: 1895494 - DNA, 15 bp, Homo sapiens
gtaaaaatctgcctc

SEQ ID NO: 1895495 - DNA, 15 bp, Homo sapiens
taaaaatctgcctcc

SEQ ID NO: 1895496 - DNA, 15 bp, Homo sapiens
aaaaatctgcctccc

SEQ ID NO: 1895497 - DNA, 15 bp, Homo sapiens
aaaatctgcctccct

SEQ ID NO: 1895498 - DNA, 15 bp, Homo sapiens
aaatctgcctccctt

SEQ ID NO: 1895499 - DNA, 15 bp, Homo sapiens
aatctgcctcccttt

SEQ ID NO: 1895500 - DNA, 15 bp, Homo sapiens
atctgcctccctttg

SEQ ID NO: 1895501 - DNA, 15 bp, Homo sapiens
tctgcctccctttgg

SEQ ID NO: 1895502 - DNA, 15 bp, Homo sapiens
ctgcctccctttggt

SEQ ID NO: 1895503 - DNA, 15 bp, Homo sapiens
tgcctccctttggtt

SEQ ID NO: 1895504 - DNA, 15 bp, Homo sapiens
gcctccctttggttt

SEQ ID NO: 1895505 - DNA, 15 bp, Homo sapiens
cctccctttggtttc

SEQ ID NO: 1895506 - DNA, 15 bp, Homo sapiens
ctccctttggtttcc

SEQ ID NO: 1895507 - DNA, 15 bp, Homo sapiens
tccctttggtttcca

SEQ ID NO: 1895508 - DNA, 15 bp, Homo sapiens
ccctttggtttccac

SEQ ID NO: 1895509 - DNA, 15 bp, Homo sapiens
cctttggtttccact

SEQ ID NO: 1895510 - DNA, 15 bp, Homo sapiens
ctttggtttccactt

SEQ ID NO: 1895511 - DNA, 15 bp, Homo sapiens
tttggtttccactta

SEQ ID NO: 1895512 - DNA, 15 bp, Homo sapiens
ttggtttccacttat

SEQ ID NO: 1895513 - DNA, 15 bp, Homo sapiens
tggtttccacttatt

SEQ ID NO: 1895514 - DNA, 15 bp, Homo sapiens
ggtttccacttattc

SEQ ID NO: 1895515 - DNA, 15 bp, Homo sapiens
gtttccacttattcc

SEQ ID NO: 1895516 - DNA, 15 bp, Homo sapiens
tttccacttattcct

SEQ ID NO: 1895517 - DNA, 15 bp, Homo sapiens
ttccacttattccta

SEQ ID NO: 1895518 - DNA, 15 bp, Homo sapiens
tccacttattcctat

SEQ ID NO: 1895519 - DNA, 15 bp, Homo sapiens
ccacttattcctatt

SEQ ID NO: 1895520 - DNA, 15 bp, Homo sapiens
cacttattcctattc

SEQ ID NO: 1895521 - DNA, 15 bp, Homo sapiens
acttattcctattct

SEQ ID NO: 1895522 - DNA, 15 bp, Homo sapiens
cttattcctattcta

SEQ ID NO: 1895523 - DNA, 15 bp, Homo sapiens
ttattcctattctat

SEQ ID NO: 1895524 - DNA, 15 bp, Homo sapiens
tattcctattctata

SEQ ID NO: 1895525 - DNA, 15 bp, Homo sapiens
attcctattctatat

SEQ ID NO: 1895526 - DNA, 15 bp, Homo sapiens
ttcctattctatatt

SEQ ID NO: 1895527 - DNA, 15 bp, Homo sapiens
tcctattctatattg

SEQ ID NO: 1895528 - DNA, 15 bp, Homo sapiens
cctattctatattga

SEQ ID NO: 1895529 - DNA, 15 bp, Homo sapiens
ctattctatattgag

SEQ ID NO: 1895530 - DNA, 15 bp, Homo sapiens
tattctatattgagg

SEQ ID NO: 1895531 - DNA, 15 bp, Homo sapiens
attctatattgaggg

SEQ ID NO: 1895532 - DNA, 15 bp, Homo sapiens
ttctatattgagggt

SEQ ID NO: 1895533 - DNA, 15 bp, Homo sapiens
tctatattgagggta

SEQ ID NO: 1895534 - DNA, 15 bp, Homo sapiens
ctatattgagggtac

SEQ ID NO: 1895535 - DNA, 15 bp, Homo sapiens
tatattgagggtaca

SEQ ID NO: 1895536 - DNA, 15 bp, Homo sapiens
atattgagggtacac

SEQ ID NO: 1895537 - DNA, 15 bp, Homo sapiens
tattgagggtacacc

SEQ ID NO: 1895538 - DNA, 15 bp, Homo sapiens
attgagggtacacca

SEQ ID NO: 1895539 - DNA, 15 bp, Homo sapiens
ttgagggtacaccaa

SEQ ID NO: 1895540 - DNA, 15 bp, Homo sapiens
tgagggtacaccaag

SEQ ID NO: 1895541 - DNA, 15 bp, Homo sapiens
gagggtacaccaagc

SEQ ID NO: 1895542 - DNA, 15 bp, Homo sapiens
agggtacaccaagca

SEQ ID NO: 1895543 - DNA, 15 bp, Homo sapiens
gggtacaccaagcag

SEQ ID NO: 1895544 - DNA, 15 bp, Homo sapiens
ggtacaccaagcagc

SEQ ID NO: 1895545 - DNA, 15 bp, Homo sapiens
gtacaccaagcagcc

SEQ ID NO: 1895546 - DNA, 15 bp, Homo sapiens
tacaccaagcagccc

SEQ ID NO: 1895547 - DNA, 15 bp, Homo sapiens
acaccaagcagccct

SEQ ID NO: 1895548 - DNA, 15 bp, Homo sapiens
caccaagcagccctc

SEQ ID NO: 1895549 - DNA, 15 bp, Homo sapiens
accaagcagccctcc

SEQ ID NO: 1895550 - DNA, 15 bp, Homo sapiens
ccaagcagccctcct

SEQ ID NO: 1895551 - DNA, 15 bp, Homo sapiens
caagcagccctcctt

SEQ ID NO: 1895552 - DNA, 15 bp, Homo sapiens
aagcagccctccttc

SEQ ID NO: 1895553 - DNA, 15 bp, Homo sapiens
agcagccctccttcc

SEQ ID NO: 1895554 - DNA, 15 bp, Homo sapiens
gcagccctccttcct

SEQ ID NO: 1895555 - DNA, 15 bp, Homo sapiens
cagccctccttcctc

SEQ ID NO: 1895556 - DNA, 15 bp, Homo sapiens
agccctccttcctct

SEQ ID NO: 1895557 - DNA, 15 bp, Homo sapiens
gccctccttcctctt

SEQ ID NO: 1895558 - DNA, 15 bp, Homo sapiens
ccctccttcctcttg

SEQ ID NO: 1895559 - DNA, 15 bp, Homo sapiens
cctccttcctcttgc

SEQ ID NO: 1895560 - DNA, 15 bp, Homo sapiens
ctccttcctcttgca

SEQ ID NO: 1895561 - DNA, 15 bp, Homo sapiens
tccttcctcttgcaa

SEQ ID NO: 1895562 - DNA, 15 bp, Homo sapiens
ccttcctcttgcaaa

SEQ ID NO: 1895563 - DNA, 15 bp, Homo sapiens
cttcctcttgcaaat

SEQ ID NO: 1895564 - DNA, 15 bp, Homo sapiens
ttcctcttgcaaatt

SEQ ID NO: 1895565 - DNA, 15 bp, Homo sapiens
tcctcttgcaaattc

SEQ ID NO: 1895566 - DNA, 15 bp, Homo sapiens
cctcttgcaaattct

SEQ ID NO: 1895567 - DNA, 15 bp, Homo sapiens
ctcttgcaaattctt

SEQ ID NO: 1895568 - DNA, 15 bp, Homo sapiens
tcttgcaaattctta

SEQ ID NO: 1895569 - DNA, 15 bp, Homo sapiens
cttgcaaattcttag

SEQ ID NO: 1895570 - DNA, 15 bp, Homo sapiens
ttgcaaattcttagg

SEQ ID NO: 1895571 - DNA, 15 bp, Homo sapiens
tgcaaattcttagga

SEQ ID NO: 1895572 - DNA, 15 bp, Homo sapiens
gcaaattcttaggac

SEQ ID NO: 1895573 - DNA, 15 bp, Homo sapiens
caaattcttaggaca

SEQ ID NO: 1895574 - DNA, 15 bp, Homo sapiens
aaattcttaggacag

SEQ ID NO: 1895575 - DNA, 15 bp, Homo sapiens
aattcttaggacagc

SEQ ID NO: 1895576 - DNA, 15 bp, Homo sapiens
attcttaggacagct

SEQ ID NO: 1895577 - DNA, 15 bp, Homo sapiens
ttcttaggacagctc

SEQ ID NO: 1895578 - DNA, 15 bp, Homo sapiens
tcttaggacagctca

SEQ ID NO: 1895579 - DNA, 15 bp, Homo sapiens
cttaggacagctcac

SEQ ID NO: 1895580 - DNA, 15 bp, Homo sapiens
ttaggacagctcact

SEQ ID NO: 1895581 - DNA, 15 bp, Homo sapiens
taggacagctcactc

SEQ ID NO: 1895582 - DNA, 15 bp, Homo sapiens
aggacagctcactca

SEQ ID NO: 1895583 - DNA, 15 bp, Homo sapiens
ggacagctcactcat

SEQ ID NO: 1895584 - DNA, 15 bp, Homo sapiens
gacagctcactcatt

SEQ ID NO: 1895585 - DNA, 15 bp, Homo sapiens
acagctcactcattc

SEQ ID NO: 1895586 - DNA, 15 bp, Homo sapiens
cagctcactcattca

SEQ ID NO: 1895587 - DNA, 15 bp, Homo sapiens
agctcactcattcat

SEQ ID NO: 1895588 - DNA, 15 bp, Homo sapiens
gctcactcattcatg

SEQ ID NO: 1895589 - DNA, 15 bp, Homo sapiens
ctcactcattcatgg

SEQ ID NO: 1895590 - DNA, 15 bp, Homo sapiens
tcactcattcatggc

SEQ ID NO: 1895591 - DNA, 15 bp, Homo sapiens
cactcattcatggcc

SEQ ID NO: 1895592 - DNA, 15 bp, Homo sapiens
actcattcatggcca

SEQ ID NO: 1895593 - DNA, 15 bp, Homo sapiens
ctcattcatggccac

SEQ ID NO: 1895594 - DNA, 15 bp, Homo sapiens
tcattcatggccacc

SEQ ID NO: 1895595 - DNA, 15 bp, Homo sapiens
cattcatggccacct

SEQ ID NO: 1895596 - DNA, 15 bp, Homo sapiens
attcatggccacctc

SEQ ID NO: 1895597 - DNA, 15 bp, Homo sapiens
ttcatggccacctct

SEQ ID NO: 1895598 - DNA, 15 bp, Homo sapiens
tcatggccacctcta

SEQ ID NO: 1895599 - DNA, 15 bp, Homo sapiens
catggccacctctaa

SEQ ID NO: 1895600 - DNA, 15 bp, Homo sapiens
atggccacctctaac

SEQ ID NO: 1895601 - DNA, 15 bp, Homo sapiens
tggccacctctaacc

SEQ ID NO: 1895602 - DNA, 15 bp, Homo sapiens
ggccacctctaacca

SEQ ID NO: 1895603 - DNA, 15 bp, Homo sapiens
gccacctctaaccaa

SEQ ID NO: 1895604 - DNA, 15 bp, Homo sapiens
ccacctctaaccaac

SEQ ID NO: 1895605 - DNA, 15 bp, Homo sapiens
cacctctaaccaact

SEQ ID NO: 1895606 - DNA, 15 bp, Homo sapiens
acctctaaccaacta

SEQ ID NO: 1895607 - DNA, 15 bp, Homo sapiens
cctctaaccaactac

SEQ ID NO: 1895608 - DNA, 15 bp, Homo sapiens
ctctaaccaactacc

SEQ ID NO: 1895609 - DNA, 15 bp, Homo sapiens
tctaaccaactacct

SEQ ID NO: 1895610 - DNA, 15 bp, Homo sapiens
ctaaccaactacctg

SEQ ID NO: 1895611 - DNA, 15 bp, Homo sapiens
taaccaactacctgc

SEQ ID NO: 1895612 - DNA, 15 bp, Homo sapiens
aaccaactacctgct

SEQ ID NO: 1895613 - DNA, 15 bp, Homo sapiens
accaactacctgctt

SEQ ID NO: 1895614 - DNA, 15 bp, Homo sapiens
ccaactacctgcttt

SEQ ID NO: 1895615 - DNA, 15 bp, Homo sapiens
caactacctgctttt

SEQ ID NO: 1895616 - DNA, 15 bp, Homo sapiens
aactacctgcttttt

SEQ ID NO: 1895617 - DNA, 15 bp, Homo sapiens
actacctgctttttc

SEQ ID NO: 1895618 - DNA, 15 bp, Homo sapiens
ctacctgctttttcc

SEQ ID NO: 1895619 - DNA, 15 bp, Homo sapiens
tacctgctttttcct

SEQ ID NO: 1895620 - DNA, 15 bp, Homo sapiens
acctgctttttcctc

SEQ ID NO: 1895621 - DNA, 15 bp, Homo sapiens
cctgctttttcctcc

SEQ ID NO: 1895622 - DNA, 15 bp, Homo sapiens
ctgctttttcctcca

SEQ ID NO: 1895623 - DNA, 15 bp, Homo sapiens
tgctttttcctccag

SEQ ID NO: 1895624 - DNA, 15 bp, Homo sapiens
gctttttcctccagg

SEQ ID NO: 1895625 - DNA, 15 bp, Homo sapiens
ctttttcctccaggt

SEQ ID NO: 1895626 - DNA, 15 bp, Homo sapiens
tttttcctccaggta

SEQ ID NO: 1895627 - DNA, 15 bp, Homo sapiens
ttttcctccaggtag

SEQ ID NO: 1895628 - DNA, 15 bp, Homo sapiens
tttcctccaggtaga

SEQ ID NO: 1895629 - DNA, 15 bp, Homo sapiens
ttcctccaggtagaa

SEQ ID NO: 1895630 - DNA, 15 bp, Homo sapiens
tcctccaggtagaat

SEQ ID NO: 1895631 - DNA, 15 bp, Homo sapiens
cctccaggtagaata

SEQ ID NO: 1895632 - DNA, 15 bp, Homo sapiens
ctccaggtagaatat

SEQ ID NO: 1895633 - DNA, 15 bp, Homo sapiens
tccaggtagaatatc

SEQ ID NO: 1895634 - DNA, 15 bp, Homo sapiens
ccaggtagaatatct

SEQ ID NO: 1895635 - DNA, 15 bp, Homo sapiens
caggtagaatatctt

SEQ ID NO: 1895636 - DNA, 15 bp, Homo sapiens
aggtagaatatctta

SEQ ID NO: 1895637 - DNA, 15 bp, Homo sapiens
ggtagaatatcttac

SEQ ID NO: 1895638 - DNA, 15 bp, Homo sapiens
gtagaatatcttaca

SEQ ID NO: 1895639 - DNA, 15 bp, Homo sapiens
tagaatatcttacat

SEQ ID NO: 1895640 - DNA, 15 bp, Homo sapiens
agaatatcttacatt

SEQ ID NO: 1895641 - DNA, 15 bp, Homo sapiens
gaatatcttacattt

SEQ ID NO: 1895642 - DNA, 15 bp, Homo sapiens
aatatcttacatttc

SEQ ID NO: 1895643 - DNA, 15 bp, Homo sapiens
atatcttacatttcc

SEQ ID NO: 1895644 - DNA, 15 bp, Homo sapiens
tatcttacatttcct

SEQ ID NO: 1895645 - DNA, 15 bp, Homo sapiens
atcttacatttcctt

SEQ ID NO: 1895646 - DNA, 15 bp, Homo sapiens
tcttacatttcctta

SEQ ID NO: 1895647 - DNA, 15 bp, Homo sapiens
cttacatttccttaa

SEQ ID NO: 1895648 - DNA, 15 bp, Homo sapiens
ttacatttccttaag

SEQ ID NO: 1895649 - DNA, 15 bp, Homo sapiens
tacatttccttaagt

SEQ ID NO: 1895650 - DNA, 15 bp, Homo sapiens
acatttccttaagtc

SEQ ID NO: 1895651 - DNA, 15 bp, Homo sapiens
catttccttaagtct

SEQ ID NO: 1895652 - DNA, 15 bp, Homo sapiens
atttccttaagtctt

SEQ ID NO: 1895653 - DNA, 15 bp, Homo sapiens
tttccttaagtcttc

SEQ ID NO: 1895654 - DNA, 15 bp, Homo sapiens
ttccttaagtcttct

SEQ ID NO: 1895655 - DNA, 15 bp, Homo sapiens
tccttaagtcttctg

SEQ ID NO: 1895656 - DNA, 15 bp, Homo sapiens
ccttaagtcttctgt

SEQ ID NO: 1895657 - DNA, 15 bp, Homo sapiens
cttaagtcttctgtg

SEQ ID NO: 1895658 - DNA, 15 bp, Homo sapiens
ttaagtcttctgtgc

SEQ ID NO: 1895659 - DNA, 15 bp, Homo sapiens
taagtcttctgtgca

SEQ ID NO: 1895660 - DNA, 15 bp, Homo sapiens
aagtcttctgtgcat

SEQ ID NO: 1895661 - DNA, 15 bp, Homo sapiens
agtcttctgtgcatg

SEQ ID NO: 1895662 - DNA, 15 bp, Homo sapiens
gtcttctgtgcatga

SEQ ID NO: 1895663 - DNA, 15 bp, Homo sapiens
tcttctgtgcatgac

SEQ ID NO: 1895664 - DNA, 15 bp, Homo sapiens
cttctgtgcatgaca

SEQ ID NO: 1895665 - DNA, 15 bp, Homo sapiens
ttctgtgcatgacat

SEQ ID NO: 1895666 - DNA, 15 bp, Homo sapiens
tctgtgcatgacatg

SEQ ID NO: 1895667 - DNA, 15 bp, Homo sapiens
ctgtgcatgacatga

SEQ ID NO: 1895668 - DNA, 15 bp, Homo sapiens
tgtgcatgacatgat

SEQ ID NO: 1895669 - DNA, 15 bp, Homo sapiens
gtgcatgacatgatt

SEQ ID NO: 1895670 - DNA, 15 bp, Homo sapiens
tgcatgacatgattt

SEQ ID NO: 1895671 - DNA, 15 bp, Homo sapiens
gcatgacatgatttc

SEQ ID NO: 1895672 - DNA, 15 bp, Homo sapiens
catgacatgatttct

SEQ ID NO: 1895673 - DNA, 15 bp, Homo sapiens
atgacatgatttcta

SEQ ID NO: 1895674 - DNA, 15 bp, Homo sapiens
tgacatgatttctac

SEQ ID NO: 1895675 - DNA, 15 bp, Homo sapiens
gacatgatttctaca

SEQ ID NO: 1895676 - DNA, 15 bp, Homo sapiens
acatgatttctacac

SEQ ID NO: 1895677 - DNA, 15 bp, Homo sapiens
catgatttctacacc

SEQ ID NO: 1895678 - DNA, 15 bp, Homo sapiens
atgatttctacaccc

SEQ ID NO: 1895679 - DNA, 15 bp, Homo sapiens
tgatttctacaccca

SEQ ID NO: 1895680 - DNA, 15 bp, Homo sapiens
gatttctacacccat

SEQ ID NO: 1895681 - DNA, 15 bp, Homo sapiens
atttctacacccatt

SEQ ID NO: 1895682 - DNA, 15 bp, Homo sapiens
tttctacacccatta

SEQ ID NO: 1895683 - DNA, 15 bp, Homo sapiens
ttctacacccattat

SEQ ID NO: 1895684 - DNA, 15 bp, Homo sapiens
tctacacccattatc

SEQ ID NO: 1895685 - DNA, 15 bp, Homo sapiens
ctacacccattatca

SEQ ID NO: 1895686 - DNA, 15 bp, Homo sapiens
tacacccattatcac

SEQ ID NO: 1895687 - DNA, 15 bp, Homo sapiens
acacccattatcacc

SEQ ID NO: 1895688 - DNA, 15 bp, Homo sapiens
cacccattatcaccc

SEQ ID NO: 1895689 - DNA, 15 bp, Homo sapiens
acccattatcaccca

SEQ ID NO: 1895690 - DNA, 15 bp, Homo sapiens
cccattatcacccat

SEQ ID NO: 1895691 - DNA, 15 bp, Homo sapiens
ccattatcacccata

SEQ ID NO: 1895692 - DNA, 15 bp, Homo sapiens
cattatcacccatat

SEQ ID NO: 1895693 - DNA, 15 bp, Homo sapiens
attatcacccatatt

SEQ ID NO: 1895694 - DNA, 15 bp, Homo sapiens
ttatcacccatattg

SEQ ID NO: 1895695 - DNA, 15 bp, Homo sapiens
tatcacccatattgc

SEQ ID NO: 1895696 - DNA, 15 bp, Homo sapiens
atcacccatattgct

SEQ ID NO: 1895697 - DNA, 15 bp, Homo sapiens
tcacccatattgctg

SEQ ID NO: 1895698 - DNA, 15 bp, Homo sapiens
cacccatattgctgc

SEQ ID NO: 1895699 - DNA, 15 bp, Homo sapiens
acccatattgctgcc

SEQ ID NO: 1895700 - DNA, 15 bp, Homo sapiens
cccatattgctgcct

SEQ ID NO: 1895701 - DNA, 15 bp, Homo sapiens
ccatattgctgcctt

SEQ ID NO: 1895702 - DNA, 15 bp, Homo sapiens
catattgctgccttg

SEQ ID NO: 1895703 - DNA, 15 bp, Homo sapiens
atattgctgccttgg

SEQ ID NO: 1895704 - DNA, 15 bp, Homo sapiens
tattgctgccttgga

SEQ ID NO: 1895705 - DNA, 15 bp, Homo sapiens
attgctgccttggat

SEQ ID NO: 1895706 - DNA, 15 bp, Homo sapiens
ttgctgccttggatg

SEQ ID NO: 1895707 - DNA, 15 bp, Homo sapiens
tgctgccttggatgt

SEQ ID NO: 1895708 - DNA, 15 bp, Homo sapiens
gctgccttggatgtt

SEQ ID NO: 1895709 - DNA, 15 bp, Homo sapiens
ctgccttggatgttc

SEQ ID NO: 1895710 - DNA, 15 bp, Homo sapiens
tgccttggatgttcc

SEQ ID NO: 1895711 - DNA, 15 bp, Homo sapiens
gccttggatgttcct

SEQ ID NO: 1895712 - DNA, 15 bp, Homo sapiens
ccttggatgttcctt

SEQ ID NO: 1895713 - DNA, 15 bp, Homo sapiens
cttggatgttcctta

SEQ ID NO: 1895714 - DNA, 15 bp, Homo sapiens
ttggatgttccttag

SEQ ID NO: 1895715 - DNA, 15 bp, Homo sapiens
tggatgttccttagt

SEQ ID NO: 1895716 - DNA, 15 bp, Homo sapiens
ggatgttccttagtt

SEQ ID NO: 1895717 - DNA, 15 bp, Homo sapiens
gatgttccttagttt

SEQ ID NO: 1895718 - DNA, 15 bp, Homo sapiens
atgttccttagttta

SEQ ID NO: 1895719 - DNA, 15 bp, Homo sapiens
tgttccttagtttat

SEQ ID NO: 1895720 - DNA, 15 bp, Homo sapiens
gttccttagtttatg

SEQ ID NO: 1895721 - DNA, 15 bp, Homo sapiens
ttccttagtttatgg

SEQ ID NO: 1895722 - DNA, 15 bp, Homo sapiens
tccttagtttatggg

SEQ ID NO: 1895723 - DNA, 15 bp, Homo sapiens
ccttagtttatgggc

SEQ ID NO: 1895724 - DNA, 15 bp, Homo sapiens
cttagtttatgggcc

SEQ ID NO: 1895725 - DNA, 15 bp, Homo sapiens
ttagtttatgggcct

SEQ ID NO: 1895726 - DNA, 15 bp, Homo sapiens
tagtttatgggccta

SEQ ID NO: 1895727 - DNA, 15 bp, Homo sapiens
agtttatgggcctac

SEQ ID NO: 1895728 - DNA, 15 bp, Homo sapiens
gtttatgggcctaca

SEQ ID NO: 1895729 - DNA, 15 bp, Homo sapiens
tttatgggcctacac

SEQ ID NO: 1895730 - DNA, 15 bp, Homo sapiens
ttatgggcctacact

SEQ ID NO: 1895731 - DNA, 15 bp, Homo sapiens
tatgggcctacacta

SEQ ID NO: 1895732 - DNA, 15 bp, Homo sapiens
atgggcctacactac

SEQ ID NO: 1895733 - DNA, 15 bp, Homo sapiens
tgggcctacactact

SEQ ID NO: 1895734 - DNA, 15 bp, Homo sapiens
gggcctacactactt

SEQ ID NO: 1895735 - DNA, 15 bp, Homo sapiens
ggcctacactacttg

SEQ ID NO: 1895736 - DNA, 15 bp, Homo sapiens
gcctacactacttgt

SEQ ID NO: 1895737 - DNA, 15 bp, Homo sapiens
cctacactacttgtt

SEQ ID NO: 1895738 - DNA, 15 bp, Homo sapiens
ctacactacttgtta

SEQ ID NO: 1895739 - DNA, 15 bp, Homo sapiens
tacactacttgttat

SEQ ID NO: 1895740 - DNA, 15 bp, Homo sapiens
acactacttgttatt

SEQ ID NO: 1895741 - DNA, 15 bp, Homo sapiens
cactacttgttattt

SEQ ID NO: 1895742 - DNA, 15 bp, Homo sapiens
actacttgttatttt

SEQ ID NO: 1895743 - DNA, 15 bp, Homo sapiens
ctacttgttattttc

SEQ ID NO: 1895744 - DNA, 15 bp, Homo sapiens
tacttgttattttct

SEQ ID NO: 1895745 - DNA, 15 bp, Homo sapiens
acttgttattttctt

SEQ ID NO: 1895746 - DNA, 15 bp, Homo sapiens
cttgttattttcttc

SEQ ID NO: 1895747 - DNA, 15 bp, Homo sapiens
ttgttattttcttct

SEQ ID NO: 1895748 - DNA, 15 bp, Homo sapiens
gttattttcttctac

SEQ ID NO: 1895749 - DNA, 15 bp, Homo sapiens
ttattttcttctact

SEQ ID NO: 1895750 - DNA, 15 bp, Homo sapiens
tattttcttctactc

SEQ ID NO: 1895751 - DNA, 15 bp, Homo sapiens
attttcttctactcc

SEQ ID NO: 1895752 - DNA, 15 bp, Homo sapiens
ttttcttctactccc

SEQ ID NO: 1895753 - DNA, 15 bp, Homo sapiens
tttcttctactccct

SEQ ID NO: 1895754 - DNA, 15 bp, Homo sapiens
ttcttctactcccta

SEQ ID NO: 1895755 - DNA, 15 bp, Homo sapiens
tcttctactccctag

SEQ ID NO: 1895756 - DNA, 15 bp, Homo sapiens
cttctactccctagc

SEQ ID NO: 1895757 - DNA, 15 bp, Homo sapiens
ttctactccctagcc

SEQ ID NO: 1895758 - DNA, 15 bp, Homo sapiens
tctactccctagcca

SEQ ID NO: 1895759 - DNA, 15 bp, Homo sapiens
ctactccctagccaa

SEQ ID NO: 1895760 - DNA, 15 bp, Homo sapiens
tactccctagccaat

SEQ ID NO: 1895761 - DNA, 15 bp, Homo sapiens
actccctagccaatc

SEQ ID NO: 1895762 - DNA, 15 bp, Homo sapiens
ctccctagccaatct

SEQ ID NO: 1895763 - DNA, 15 bp, Homo sapiens
tccctagccaatctc

SEQ ID NO: 1895764 - DNA, 15 bp, Homo sapiens
ccctagccaatctct

SEQ ID NO: 1895765 - DNA, 15 bp, Homo sapiens
cctagccaatctctg

SEQ ID NO: 1895766 - DNA, 15 bp, Homo sapiens
ctagccaatctctga

SEQ ID NO: 1895767 - DNA, 15 bp, Homo sapiens
tagccaatctctgag

SEQ ID NO: 1895768 - DNA, 15 bp, Homo sapiens
agccaatctctgagt

SEQ ID NO: 1895769 - DNA, 15 bp, Homo sapiens
gccaatctctgagta

SEQ ID NO: 1895770 - DNA, 15 bp, Homo sapiens
ccaatctctgagtaa

SEQ ID NO: 1895771 - DNA, 15 bp, Homo sapiens
caatctctgagtaaa

SEQ ID NO: 1895772 - DNA, 15 bp, Homo sapiens
aatctctgagtaaaa

SEQ ID NO: 1895773 - DNA, 15 bp, Homo sapiens
atctctgagtaaaag

SEQ ID NO: 1895774 - DNA, 15 bp, Homo sapiens
tctctgagtaaaagt

SEQ ID NO: 1895775 - DNA, 15 bp, Homo sapiens
ctctgagtaaaagta

SEQ ID NO: 1895776 - DNA, 15 bp, Homo sapiens
tctgagtaaaagtag

SEQ ID NO: 1895777 - DNA, 15 bp, Homo sapiens
ctgagtaaaagtagt

SEQ ID NO: 1895778 - DNA, 15 bp, Homo sapiens
tgagtaaaagtagtt

SEQ ID NO: 1895779 - DNA, 15 bp, Homo sapiens
gagtaaaagtagttg

SEQ ID NO: 1895780 - DNA, 15 bp, Homo sapiens
agtaaaagtagttgc

SEQ ID NO: 1895781 - DNA, 15 bp, Homo sapiens
gtaaaagtagttgcc

SEQ ID NO: 1895782 - DNA, 15 bp, Homo sapiens
taaaagtagttgcca

SEQ ID NO: 1895783 - DNA, 15 bp, Homo sapiens
aaaagtagttgccaa

SEQ ID NO: 1895784 - DNA, 15 bp, Homo sapiens
aaagtagttgccaaa

SEQ ID NO: 1895785 - DNA, 15 bp, Homo sapiens
aagtagttgccaaaa

SEQ ID NO: 1895786 - DNA, 15 bp, Homo sapiens
agtagttgccaaaac

SEQ ID NO: 1895787 - DNA, 15 bp, Homo sapiens
gtagttgccaaaact

SEQ ID NO: 1895788 - DNA, 15 bp, Homo sapiens
tagttgccaaaactc

SEQ ID NO: 1895789 - DNA, 15 bp, Homo sapiens
agttgccaaaactct

SEQ ID NO: 1895790 - DNA, 15 bp, Homo sapiens
gttgccaaaactctg

SEQ ID NO: 1895791 - DNA, 15 bp, Homo sapiens
ttgccaaaactctga

SEQ ID NO: 1895792 - DNA, 15 bp, Homo sapiens
tgccaaaactctgag

SEQ ID NO: 1895793 - DNA, 15 bp, Homo sapiens
gccaaaactctgagt

SEQ ID NO: 1895794 - DNA, 15 bp, Homo sapiens
ccaaaactctgagta

SEQ ID NO: 1895795 - DNA, 15 bp, Homo sapiens
caaaactctgagtag

SEQ ID NO: 1895796 - DNA, 15 bp, Homo sapiens
aaaactctgagtaga

SEQ ID NO: 1895797 - DNA, 15 bp, Homo sapiens
aaactctgagtagag

SEQ ID NO: 1895798 - DNA, 15 bp, Homo sapiens
aactctgagtagagt

SEQ ID NO: 1895799 - DNA, 15 bp, Homo sapiens
actctgagtagagtg

SEQ ID NO: 1895800 - DNA, 15 bp, Homo sapiens
ctctgagtagagtgt

SEQ ID NO: 1895801 - DNA, 15 bp, Homo sapiens
tctgagtagagtgtg

SEQ ID NO: 1895802 - DNA, 15 bp, Homo sapiens
ctgagtagagtgtga

SEQ ID NO: 1895803 - DNA, 15 bp, Homo sapiens
tgagtagagtgtgac

SEQ ID NO: 1895804 - DNA, 15 bp, Homo sapiens
gagtagagtgtgact

SEQ ID NO: 1895805 - DNA, 15 bp, Homo sapiens
agtagagtgtgactt

SEQ ID NO: 1895806 - DNA, 15 bp, Homo sapiens
gtagagtgtgactta

SEQ ID NO: 1895807 - DNA, 15 bp, Homo sapiens
tagagtgtgacttag

SEQ ID NO: 1895808 - DNA, 15 bp, Homo sapiens
agagtgtgacttagt

SEQ ID NO: 1895809 - DNA, 15 bp, Homo sapiens
gagtgtgacttagta

SEQ ID NO: 1895810 - DNA, 15 bp, Homo sapiens
agtgtgacttagtaa

SEQ ID NO: 1895811 - DNA, 15 bp, Homo sapiens
gtgtgacttagtaaa

SEQ ID NO: 1895812 - DNA, 15 bp, Homo sapiens
tgtgacttagtaaaa

SEQ ID NO: 1895813 - DNA, 15 bp, Homo sapiens
gtgacttagtaaaat

SEQ ID NO: 1895814 - DNA, 15 bp, Homo sapiens
tgacttagtaaaatt

SEQ ID NO: 1895815 - DNA, 15 bp, Homo sapiens
gacttagtaaaattt

SEQ ID NO: 1895816 - DNA, 15 bp, Homo sapiens
acttagtaaaattta

SEQ ID NO: 1895817 - DNA, 15 bp, Homo sapiens
cttagtaaaatttaa

SEQ ID NO: 1895818 - DNA, 15 bp, Homo sapiens
ttagtaaaatttaaa

SEQ ID NO: 1895819 - DNA, 15 bp, Homo sapiens
tagtaaaatttaaaa

SEQ ID NO: 1895820 - DNA, 15 bp, Homo sapiens
agtaaaatttaaaat

SEQ ID NO: 1895821 - DNA, 15 bp, Homo sapiens
gtaaaatttaaaata

SEQ ID NO: 1895822 - DNA, 15 bp, Homo sapiens
taaaatttaaaataa

SEQ ID NO: 1895823 - DNA, 15 bp, Homo sapiens
aaaatttaaaataag

SEQ ID NO: 1895824 - DNA, 15 bp, Homo sapiens
aaatttaaaataaga

SEQ ID NO: 1895825 - DNA, 15 bp, Homo sapiens
aatttaaaataagaa

SEQ ID NO: 1895826 - DNA, 15 bp, Homo sapiens
atttaaaataagaat

SEQ ID NO: 1895827 - DNA, 15 bp, Homo sapiens
tttaaaataagaata

SEQ ID NO: 1895828 - DNA, 15 bp, Homo sapiens
ttaaaataagaatat

SEQ ID NO: 1895829 - DNA, 15 bp, Homo sapiens
taaaataagaatata

SEQ ID NO: 1895830 - DNA, 15 bp, Homo sapiens
ataagaatatattta

SEQ ID NO: 1895831 - DNA, 15 bp, Homo sapiens
taagaatatatttac

SEQ ID NO: 1895832 - DNA, 15 bp, Homo sapiens
aagaatatatttaca

SEQ ID NO: 1895833 - DNA, 15 bp, Homo sapiens
agaatatatttacat

SEQ ID NO: 1895834 - DNA, 15 bp, Homo sapiens
gaatatatttacatt

SEQ ID NO: 1895835 - DNA, 15 bp, Homo sapiens
aatatatttacatta

SEQ ID NO: 1895836 - DNA, 15 bp, Homo sapiens
atatatttacattaa

SEQ ID NO: 1895837 - DNA, 15 bp, Homo sapiens
tatatttacattaaa

SEQ ID NO: 1895838 - DNA, 15 bp, Homo sapiens
atatttacattaaac

SEQ ID NO: 1895839 - DNA, 15 bp, Homo sapiens
tatttacattaaaca

SEQ ID NO: 1895840 - DNA, 15 bp, Homo sapiens
atttacattaaacaa

SEQ ID NO: 1895841 - DNA, 15 bp, Homo sapiens
tttacattaaacaat

SEQ ID NO: 1895842 - DNA, 15 bp, Homo sapiens
ttacattaaacaatt

SEQ ID NO: 1895843 - DNA, 15 bp, Homo sapiens
tacattaaacaatta

SEQ ID NO: 1895844 - DNA, 15 bp, Homo sapiens
acattaaacaattat

SEQ ID NO: 1895845 - DNA, 15 bp, Homo sapiens
cattaaacaattatt

SEQ ID NO: 1895846 - DNA, 15 bp, Homo sapiens
attaaacaattattg

SEQ ID NO: 1895847 - DNA, 15 bp, Homo sapiens
ttaaacaattattgc

SEQ ID NO: 1895848 - DNA, 15 bp, Homo sapiens
taaacaattattgct

SEQ ID NO: 1895849 - DNA, 15 bp, Homo sapiens
aaacaattattgctc

SEQ ID NO: 1895850 - DNA, 15 bp, Homo sapiens
aacaattattgctct

SEQ ID NO: 1895851 - DNA, 15 bp, Homo sapiens
acaattattgctctt

SEQ ID NO: 1895852 - DNA, 15 bp, Homo sapiens
caattattgctcttt

SEQ ID NO: 1895853 - DNA, 15 bp, Homo sapiens
aattattgctctttt

SEQ ID NO: 1895854 - DNA, 15 bp, Homo sapiens
attattgctctttta

SEQ ID NO: 1895855 - DNA, 15 bp, Homo sapiens
ttattgctcttttat

SEQ ID NO: 1895856 - DNA, 15 bp, Homo sapiens
tattgctcttttatg

SEQ ID NO: 1895857 - DNA, 15 bp, Homo sapiens
attgctcttttatgt

SEQ ID NO: 1895858 - DNA, 15 bp, Homo sapiens
ttgctcttttatgtt

SEQ ID NO: 1895859 - DNA, 15 bp, Homo sapiens
tgctcttttatgttt

SEQ ID NO: 1895860 - DNA, 15 bp, Homo sapiens
gctcttttatgtttt

SEQ ID NO: 1895861 - DNA, 15 bp, Homo sapiens
ctcttttatgttttc

SEQ ID NO: 1895862 - DNA, 15 bp, Homo sapiens
tcttttatgttttct

SEQ ID NO: 1895863 - DNA, 15 bp, Homo sapiens
cttttatgttttctg

SEQ ID NO: 1895864 - DNA, 15 bp, Homo sapiens
ttttatgttttctgt

SEQ ID NO: 1895865 - DNA, 15 bp, Homo sapiens
tttatgttttctgtt

SEQ ID NO: 1895866 - DNA, 15 bp, Homo sapiens
ttatgttttctgttt

SEQ ID NO: 1895867 - DNA, 15 bp, Homo sapiens
tatgttttctgtttt

SEQ ID NO: 1895868 - DNA, 15 bp, Homo sapiens
atgttttctgttttt

SEQ ID NO: 1895869 - DNA, 15 bp, Homo sapiens
tgttttctgtttttc

SEQ ID NO: 1895870 - DNA, 15 bp, Homo sapiens
gttttctgtttttct

SEQ ID NO: 1895871 - DNA, 15 bp, Homo sapiens
ttttctgtttttctg

SEQ ID NO: 1895872 - DNA, 15 bp, Homo sapiens
tttctgtttttctgt

SEQ ID NO: 1895873 - DNA, 15 bp, Homo sapiens
ttctgtttttctgtt

SEQ ID NO: 1895874 - DNA, 15 bp, Homo sapiens
tctgtttttctgtta

SEQ ID NO: 1895875 - DNA, 15 bp, Homo sapiens
ctgtttttctgttaa

SEQ ID NO: 1895876 - DNA, 15 bp, Homo sapiens
tgtttttctgttaaa

SEQ ID NO: 1895877 - DNA, 15 bp, Homo sapiens
gtttttctgttaaac

SEQ ID NO: 1895878 - DNA, 15 bp, Homo sapiens
tttttctgttaaaca

SEQ ID NO: 1895879 - DNA, 15 bp, Homo sapiens
ttttctgttaaacat

SEQ ID NO: 1895880 - DNA, 15 bp, Homo sapiens
tttctgttaaacatt

SEQ ID NO: 1895881 - DNA, 15 bp, Homo sapiens
ttctgttaaacattt

SEQ ID NO: 1895882 - DNA, 15 bp, Homo sapiens
tctgttaaacatttt

SEQ ID NO: 1895883 - DNA, 15 bp, Homo sapiens
ctgttaaacattttt

SEQ ID NO: 1895884 - DNA, 15 bp, Homo sapiens
tgttaaacattttta

SEQ ID NO: 1895885 - DNA, 15 bp, Homo sapiens
gttaaacatttttag

SEQ ID NO: 1895886 - DNA, 15 bp, Homo sapiens
ttaaacatttttaga

SEQ ID NO: 1895887 - DNA, 15 bp, Homo sapiens
taaacatttttagag

SEQ ID NO: 1895888 - DNA, 15 bp, Homo sapiens
aaacatttttagagc

SEQ ID NO: 1895889 - DNA, 15 bp, Homo sapiens
aacatttttagagca

SEQ ID NO: 1895890 - DNA, 15 bp, Homo sapiens
acatttttagagcat

SEQ ID NO: 1895891 - DNA, 15 bp, Homo sapiens
catttttagagcata

SEQ ID NO: 1895892 - DNA, 15 bp, Homo sapiens
atttttagagcatat

SEQ ID NO: 1895893 - DNA, 15 bp, Homo sapiens
tttttagagcatatt

SEQ ID NO: 1895894 - DNA, 15 bp, Homo sapiens
ttttagagcatattt

SEQ ID NO: 1895895 - DNA, 15 bp, Homo sapiens
tttagagcatatttg

SEQ ID NO: 1895896 - DNA, 15 bp, Homo sapiens
ttagagcatatttgt

SEQ ID NO: 1895897 - DNA, 15 bp, Homo sapiens
tagagcatatttgta

SEQ ID NO: 1895898 - DNA, 15 bp, Homo sapiens
agagcatatttgtaa

SEQ ID NO: 1895899 - DNA, 15 bp, Homo sapiens
gagcatatttgtaaa

SEQ ID NO: 1895900 - DNA, 15 bp, Homo sapiens
agcatatttgtaaaa

SEQ ID NO: 1895901 - DNA, 15 bp, Homo sapiens
gcatatttgtaaaaa

SEQ ID NO: 1895902 - DNA, 15 bp, Homo sapiens
catatttgtaaaaat

SEQ ID NO: 1895903 - DNA, 15 bp, Homo sapiens
atatttgtaaaaata

SEQ ID NO: 1895904 - DNA, 15 bp, Homo sapiens
tatttgtaaaaatat

SEQ ID NO: 1895905 - DNA, 15 bp, Homo sapiens
atttgtaaaaatatg

SEQ ID NO: 1895906 - DNA, 15 bp, Homo sapiens
tttgtaaaaatatgt

SEQ ID NO: 1895907 - DNA, 15 bp, Homo sapiens
ttgtaaaaatatgtc

SEQ ID NO: 1895908 - DNA, 15 bp, Homo sapiens
tgtaaaaatatgtca

SEQ ID NO: 1895909 - DNA, 15 bp, Homo sapiens
gtaaaaatatgtcat

SEQ ID NO: 1895910 - DNA, 15 bp, Homo sapiens
taaaaatatgtcatt

SEQ ID NO: 1895911 - DNA, 15 bp, Homo sapiens
aaaaatatgtcatta

SEQ ID NO: 1895912 - DNA, 15 bp, Homo sapiens
aaaatatgtcattag

SEQ ID NO: 1895913 - DNA, 15 bp, Homo sapiens
aaatatgtcattagt

SEQ ID NO: 1895914 - DNA, 15 bp, Homo sapiens
aatatgtcattagtc

SEQ ID NO: 1895915 - DNA, 15 bp, Homo sapiens
atatgtcattagtcc

SEQ ID NO: 1895916 - DNA, 15 bp, Homo sapiens
tatgtcattagtcca

SEQ ID NO: 1895917 - DNA, 15 bp, Homo sapiens
atgtcattagtccag

SEQ ID NO: 1895918 - DNA, 15 bp, Homo sapiens
tgtcattagtccagt

SEQ ID NO: 1895919 - DNA, 15 bp, Homo sapiens
gtcattagtccagta

SEQ ID NO: 1895920 - DNA, 15 bp, Homo sapiens
tcattagtccagtat

SEQ ID NO: 1895921 - DNA, 15 bp, Homo sapiens
cattagtccagtatt

SEQ ID NO: 1895922 - DNA, 15 bp, Homo sapiens
attagtccagtattc

SEQ ID NO: 1895923 - DNA, 15 bp, Homo sapiens
ttagtccagtattct

SEQ ID NO: 1895924 - DNA, 15 bp, Homo sapiens
tagtccagtattctt

SEQ ID NO: 1895925 - DNA, 15 bp, Homo sapiens
agtccagtattcttc

SEQ ID NO: 1895926 - DNA, 15 bp, Homo sapiens
gtccagtattcttca

SEQ ID NO: 1895927 - DNA, 15 bp, Homo sapiens
tccagtattcttcat

SEQ ID NO: 1895928 - DNA, 15 bp, Homo sapiens
ccagtattcttcatt

SEQ ID NO: 1895929 - DNA, 15 bp, Homo sapiens
cagtattcttcatta

SEQ ID NO: 1895930 - DNA, 15 bp, Homo sapiens
agtattcttcattaa

SEQ ID NO: 1895931 - DNA, 15 bp, Homo sapiens
gtattcttcattaaa

SEQ ID NO: 1895932 - DNA, 15 bp, Homo sapiens
tattcttcattaaac

SEQ ID NO: 1895933 - DNA, 15 bp, Homo sapiens
attcttcattaaact

SEQ ID NO: 1895934 - DNA, 15 bp, Homo sapiens
ttcttcattaaacta

SEQ ID NO: 1895935 - DNA, 15 bp, Homo sapiens
tcttcattaaactaa

SEQ ID NO: 1895936 - DNA, 15 bp, Homo sapiens
cttcattaaactaac

SEQ ID NO: 1895937 - DNA, 15 bp, Homo sapiens
ttcattaaactaact

SEQ ID NO: 1895938 - DNA, 15 bp, Homo sapiens
tcattaaactaactg

SEQ ID NO: 1895939 - DNA, 15 bp, Homo sapiens
cattaaactaactgt

SEQ ID NO: 1895940 - DNA, 15 bp, Homo sapiens
attaaactaactgta

SEQ ID NO: 1895941 - DNA, 15 bp, Homo sapiens
ttaaactaactgtaa

SEQ ID NO: 1895942 - DNA, 15 bp, Homo sapiens
taaactaactgtaat

SEQ ID NO: 1895943 - DNA, 15 bp, Homo sapiens
aaactaactgtaata

SEQ ID NO: 1895944 - DNA, 15 bp, Homo sapiens
aactaactgtaatag

SEQ ID NO: 1895945 - DNA, 15 bp, Homo sapiens
actaactgtaatagc

SEQ ID NO: 1895946 - DNA, 15 bp, Homo sapiens
ctaactgtaatagca

SEQ ID NO: 1895947 - DNA, 15 bp, Homo sapiens
taactgtaatagcac

SEQ ID NO: 1895948 - DNA, 15 bp, Homo sapiens
aactgtaatagcact

SEQ ID NO: 1895949 - DNA, 15 bp, Homo sapiens
actgtaatagcactt

SEQ ID NO: 1895950 - DNA, 15 bp, Homo sapiens
ctgtaatagcacttg

SEQ ID NO: 1895951 - DNA, 15 bp, Homo sapiens
tgtaatagcacttgg

SEQ ID NO: 1895952 - DNA, 15 bp, Homo sapiens
gtaatagcacttggt

SEQ ID NO: 1895953 - DNA, 15 bp, Homo sapiens
taatagcacttggtg

SEQ ID NO: 1895954 - DNA, 15 bp, Homo sapiens
aatagcacttggtgg

SEQ ID NO: 1895955 - DNA, 15 bp, Homo sapiens
atagcacttggtggg

SEQ ID NO: 1895956 - DNA, 15 bp, Homo sapiens
tagcacttggtggga

SEQ ID NO: 1895957 - DNA, 15 bp, Homo sapiens
agcacttggtgggag

SEQ ID NO: 1895958 - DNA, 15 bp, Homo sapiens
gcacttggtgggagt

SEQ ID NO: 1895959 - DNA, 15 bp, Homo sapiens
cacttggtgggagtt

SEQ ID NO: 1895960 - DNA, 15 bp, Homo sapiens
acttggtgggagttt

SEQ ID NO: 1895961 - DNA, 15 bp, Homo sapiens
cttggtgggagtttt

SEQ ID NO: 1895962 - DNA, 15 bp, Homo sapiens
ttggtgggagttttg

SEQ ID NO: 1895963 - DNA, 15 bp, Homo sapiens
tggtgggagttttga

SEQ ID NO: 1895964 - DNA, 15 bp, Homo sapiens
ggtgggagttttgaa

SEQ ID NO: 1895965 - DNA, 15 bp, Homo sapiens
gtgggagttttgaat

SEQ ID NO: 1895966 - DNA, 15 bp, Homo sapiens
tgggagttttgaatc

SEQ ID NO: 1895967 - DNA, 15 bp, Homo sapiens
gggagttttgaatca

SEQ ID NO: 1895968 - DNA, 15 bp, Homo sapiens
ggagttttgaatcag

SEQ ID NO: 1895969 - DNA, 15 bp, Homo sapiens
gagttttgaatcagt

SEQ ID NO: 1895970 - DNA, 15 bp, Homo sapiens
agttttgaatcagta

SEQ ID NO: 1895971 - DNA, 15 bp, Homo sapiens
gttttgaatcagtag

SEQ ID NO: 1895972 - DNA, 15 bp, Homo sapiens
ttttgaatcagtaga

SEQ ID NO: 1895973 - DNA, 15 bp, Homo sapiens
tttgaatcagtagag

SEQ ID NO: 1895974 - DNA, 15 bp, Homo sapiens
ttgaatcagtagaga

SEQ ID NO: 1895975 - DNA, 15 bp, Homo sapiens
tgaatcagtagagat

SEQ ID NO: 1895976 - DNA, 15 bp, Homo sapiens
gaatcagtagagatt

SEQ ID NO: 1895977 - DNA, 15 bp, Homo sapiens
aatcagtagagattc

SEQ ID NO: 1895978 - DNA, 15 bp, Homo sapiens
atcagtagagattcc

SEQ ID NO: 1895979 - DNA, 15 bp, Homo sapiens
tcagtagagattccc

SEQ ID NO: 1895980 - DNA, 15 bp, Homo sapiens
cagtagagattccca

SEQ ID NO: 1895981 - DNA, 15 bp, Homo sapiens
agtagagattcccag

SEQ ID NO: 1895982 - DNA, 15 bp, Homo sapiens
gtagagattcccagc

SEQ ID NO: 1895983 - DNA, 15 bp, Homo sapiens
tagagattcccagcc

SEQ ID NO: 1895984 - DNA, 15 bp, Homo sapiens
agagattcccagcct

SEQ ID NO: 1895985 - DNA, 15 bp, Homo sapiens
gagattcccagcctc

SEQ ID NO: 1895986 - DNA, 15 bp, Homo sapiens
agattcccagcctcc

SEQ ID NO: 1895987 - DNA, 15 bp, Homo sapiens
gattcccagcctcca

SEQ ID NO: 1895988 - DNA, 15 bp, Homo sapiens
attcccagcctccag

SEQ ID NO: 1895989 - DNA, 15 bp, Homo sapiens
ttcccagcctccagt

SEQ ID NO: 1895990 - DNA, 15 bp, Homo sapiens
tcccagcctccagtc

SEQ ID NO: 1895991 - DNA, 15 bp, Homo sapiens
cccagcctccagtct

SEQ ID NO: 1895992 - DNA, 15 bp, Homo sapiens
ccagcctccagtcta

SEQ ID NO: 1895993 - DNA, 15 bp, Homo sapiens
cagcctccagtctat

SEQ ID NO: 1895994 - DNA, 15 bp, Homo sapiens
agcctccagtctata

SEQ ID NO: 1895995 - DNA, 15 bp, Homo sapiens
gcctccagtctatat

SEQ ID NO: 1895996 - DNA, 15 bp, Homo sapiens
cctccagtctatata

SEQ ID NO: 1895997 - DNA, 15 bp, Homo sapiens
ctccagtctatatat

SEQ ID NO: 1895998 - DNA, 15 bp, Homo sapiens
tccagtctatatatt

SEQ ID NO: 1895999 - DNA, 15 bp, Homo sapiens
ccagtctatatattc

SEQ ID NO: 1896000 - DNA, 15 bp, Homo sapiens
cagtctatatattca

SEQ ID NO: 1896001 - DNA, 15 bp, Homo sapiens
agtctatatattcac

SEQ ID NO: 1896002 - DNA, 15 bp, Homo sapiens
gtctatatattcacc

SEQ ID NO: 1896003 - DNA, 15 bp, Homo sapiens
tctatatattcacct

SEQ ID NO: 1896004 - DNA, 15 bp, Homo sapiens
ctatatattcacctg

SEQ ID NO: 1896005 - DNA, 15 bp, Homo sapiens
tatatattcacctgg

SEQ ID NO: 1896006 - DNA, 15 bp, Homo sapiens
atatattcacctggc

SEQ ID NO: 1896007 - DNA, 15 bp, Homo sapiens
tatattcacctggcc

SEQ ID NO: 1896008 - DNA, 15 bp, Homo sapiens
atattcacctggccg

SEQ ID NO: 1896009 - DNA, 15 bp, Homo sapiens
tattcacctggccgc

SEQ ID NO: 1896010 - DNA, 15 bp, Homo sapiens
attcacctggccgca

SEQ ID NO: 1896011 - DNA, 15 bp, Homo sapiens
ttcacctggccgcac

SEQ ID NO: 1896012 - DNA, 15 bp, Homo sapiens
tcacctggccgcacc

SEQ ID NO: 1896013 - DNA, 15 bp, Homo sapiens
cacctggccgcacca

SEQ ID NO: 1896014 - DNA, 15 bp, Homo sapiens
acctggccgcaccac

SEQ ID NO: 1896015 - DNA, 15 bp, Homo sapiens
cctggccgcaccacc

SEQ ID NO: 1896016 - DNA, 15 bp, Homo sapiens
ctggccgcaccacca

SEQ ID NO: 1896017 - DNA, 15 bp, Homo sapiens
tggccgcaccaccag

SEQ ID NO: 1896018 - DNA, 15 bp, Homo sapiens
ggccgcaccaccaga

SEQ ID NO: 1896019 - DNA, 15 bp, Homo sapiens
gccgcaccaccagaa

SEQ ID NO: 1896020 - DNA, 15 bp, Homo sapiens
ccgcaccaccagaaa

SEQ ID NO: 1896021 - DNA, 15 bp, Homo sapiens
cgcaccaccagaaat

SEQ ID NO: 1896022 - DNA, 15 bp, Homo sapiens
gcaccaccagaaatc

SEQ ID NO: 1896023 - DNA, 15 bp, Homo sapiens
caccaccagaaatcc

SEQ ID NO: 1896024 - DNA, 15 bp, Homo sapiens
accaccagaaatcca

SEQ ID NO: 1896025 - DNA, 15 bp, Homo sapiens
ccaccagaaatccaa

SEQ ID NO: 1896026 - DNA, 15 bp, Homo sapiens
caccagaaatccaaa

SEQ ID NO: 1896027 - DNA, 15 bp, Homo sapiens
accagaaatccaaaa

SEQ ID NO: 1896028 - DNA, 15 bp, Homo sapiens
ccagaaatccaaaat

SEQ ID NO: 1896029 - DNA, 15 bp, Homo sapiens
cagaaatccaaaatc

SEQ ID NO: 1896030 - DNA, 15 bp, Homo sapiens
agaaatccaaaatct

SEQ ID NO: 1896031 - DNA, 15 bp, Homo sapiens
gaaatccaaaatctt

SEQ ID NO: 1896032 - DNA, 15 bp, Homo sapiens
aaatccaaaatcttg

SEQ ID NO: 1896033 - DNA, 15 bp, Homo sapiens
aatccaaaatcttga

SEQ ID NO: 1896034 - DNA, 15 bp, Homo sapiens
atccaaaatcttgag

SEQ ID NO: 1896035 - DNA, 15 bp, Homo sapiens
tccaaaatcttgagt

SEQ ID NO: 1896036 - DNA, 15 bp, Homo sapiens
ccaaaatcttgagta

SEQ ID NO: 1896037 - DNA, 15 bp, Homo sapiens
caaaatcttgagtat

SEQ ID NO: 1896038 - DNA, 15 bp, Homo sapiens
aaaatcttgagtatt

SEQ ID NO: 1896039 - DNA, 15 bp, Homo sapiens
aaatcttgagtatta

SEQ ID NO: 1896040 - DNA, 15 bp, Homo sapiens
aatcttgagtattag

SEQ ID NO: 1896041 - DNA, 15 bp, Homo sapiens
atcttgagtattagc

SEQ ID NO: 1896042 - DNA, 15 bp, Homo sapiens
tcttgagtattagca

SEQ ID NO: 1896043 - DNA, 15 bp, Homo sapiens
cttgagtattagcag

SEQ ID NO: 1896044 - DNA, 15 bp, Homo sapiens
ttgagtattagcagg

SEQ ID NO: 1896045 - DNA, 15 bp, Homo sapiens
tgagtattagcagga

SEQ ID NO: 1896046 - DNA, 15 bp, Homo sapiens
gagtattagcaggag

SEQ ID NO: 1896047 - DNA, 15 bp, Homo sapiens
agtattagcaggagg

SEQ ID NO: 1896048 - DNA, 15 bp, Homo sapiens
gtattagcaggaggt

SEQ ID NO: 1896049 - DNA, 15 bp, Homo sapiens
tattagcaggaggta

SEQ ID NO: 1896050 - DNA, 15 bp, Homo sapiens
attagcaggaggtat

SEQ ID NO: 1896051 - DNA, 15 bp, Homo sapiens
ttagcaggaggtatc

SEQ ID NO: 1896052 - DNA, 15 bp, Homo sapiens
tagcaggaggtatct

SEQ ID NO: 1896053 - DNA, 15 bp, Homo sapiens
agcaggaggtatctg

SEQ ID NO: 1896054 - DNA, 15 bp, Homo sapiens
gcaggaggtatctgt

SEQ ID NO: 1896055 - DNA, 15 bp, Homo sapiens
caggaggtatctgta

SEQ ID NO: 1896056 - DNA, 15 bp, Homo sapiens
aggaggtatctgtat

SEQ ID NO: 1896057 - DNA, 15 bp, Homo sapiens
ggaggtatctgtatt

SEQ ID NO: 1896058 - DNA, 15 bp, Homo sapiens
gaggtatctgtattt

SEQ ID NO: 1896059 - DNA, 15 bp, Homo sapiens
aggtatctgtatttt

SEQ ID NO: 1896060 - DNA, 15 bp, Homo sapiens
ggtatctgtattttt

SEQ ID NO: 1896061 - DNA, 15 bp, Homo sapiens
gtatctgtatttttc

SEQ ID NO: 1896062 - DNA, 15 bp, Homo sapiens
tatctgtatttttca

SEQ ID NO: 1896063 - DNA, 15 bp, Homo sapiens
atctgtatttttcac

SEQ ID NO: 1896064 - DNA, 15 bp, Homo sapiens
tctgtatttttcaca

SEQ ID NO: 1896065 - DNA, 15 bp, Homo sapiens
ctgtatttttcacaa

SEQ ID NO: 1896066 - DNA, 15 bp, Homo sapiens
tgtatttttcacaaa

SEQ ID NO: 1896067 - DNA, 15 bp, Homo sapiens
gtatttttcacaaag

SEQ ID NO: 1896068 - DNA, 15 bp, Homo sapiens
tatttttcacaaagc

SEQ ID NO: 1896069 - DNA, 15 bp, Homo sapiens
atttttcacaaagcc

SEQ ID NO: 1896070 - DNA, 15 bp, Homo sapiens
tttttcacaaagccc

SEQ ID NO: 1896071 - DNA, 15 bp, Homo sapiens
ttttcacaaagcccc

SEQ ID NO: 1896072 - DNA, 15 bp, Homo sapiens
tttcacaaagccccc

SEQ ID NO: 1896073 - DNA, 15 bp, Homo sapiens
ttcacaaagccccca

SEQ ID NO: 1896074 - DNA, 15 bp, Homo sapiens
tcacaaagcccccag

SEQ ID NO: 1896075 - DNA, 15 bp, Homo sapiens
cacaaagcccccagc

SEQ ID NO: 1896076 - DNA, 15 bp, Homo sapiens
acaaagcccccagca

SEQ ID NO: 1896077 - DNA, 15 bp, Homo sapiens
caaagcccccagcat

SEQ ID NO: 1896078 - DNA, 15 bp, Homo sapiens
aaagcccccagcata

SEQ ID NO: 1896079 - DNA, 15 bp, Homo sapiens
aagcccccagcatat

SEQ ID NO: 1896080 - DNA, 15 bp, Homo sapiens
agcccccagcatatt

SEQ ID NO: 1896081 - DNA, 15 bp, Homo sapiens
gcccccagcatattc

SEQ ID NO: 1896082 - DNA, 15 bp, Homo sapiens
cccccagcatattct

SEQ ID NO: 1896083 - DNA, 15 bp, Homo sapiens
ccccagcatattctg

SEQ ID NO: 1896084 - DNA, 15 bp, Homo sapiens
cccagcatattctga

SEQ ID NO: 1896085 - DNA, 15 bp, Homo sapiens
ccagcatattctgag

SEQ ID NO: 1896086 - DNA, 15 bp, Homo sapiens
cagcatattctgagg

SEQ ID NO: 1896087 - DNA, 15 bp, Homo sapiens
agcatattctgagga

SEQ ID NO: 1896088 - DNA, 15 bp, Homo sapiens
gcatattctgaggat

SEQ ID NO: 1896089 - DNA, 15 bp, Homo sapiens
catattctgaggatg

SEQ ID NO: 1896090 - DNA, 15 bp, Homo sapiens
atattctgaggatgg

SEQ ID NO: 1896091 - DNA, 15 bp, Homo sapiens
tattctgaggatgga

SEQ ID NO: 1896092 - DNA, 15 bp, Homo sapiens
attctgaggatggag

SEQ ID NO: 1896093 - DNA, 15 bp, Homo sapiens
ttctgaggatggaga

SEQ ID NO: 1896094 - DNA, 15 bp, Homo sapiens
tctgaggatggagat

SEQ ID NO: 1896095 - DNA, 15 bp, Homo sapiens
ctgaggatggagatt

SEQ ID NO: 1896096 - DNA, 15 bp, Homo sapiens
tgaggatggagattg

SEQ ID NO: 1896097 - DNA, 15 bp, Homo sapiens
gaggatggagattga

SEQ ID NO: 1896098 - DNA, 15 bp, Homo sapiens
aggatggagattgat

SEQ ID NO: 1896099 - DNA, 15 bp, Homo sapiens
ggatggagattgatg

SEQ ID NO: 1896100 - DNA, 15 bp, Homo sapiens
gatggagattgatgg

SEQ ID NO: 1896101 - DNA, 15 bp, Homo sapiens
atggagattgatggc

SEQ ID NO: 1896102 - DNA, 15 bp, Homo sapiens
tggagattgatggca

SEQ ID NO: 1896103 - DNA, 15 bp, Homo sapiens
ggagattgatggcat

SEQ ID NO: 1896104 - DNA, 15 bp, Homo sapiens
gagattgatggcatt

SEQ ID NO: 1896105 - DNA, 15 bp, Homo sapiens
agattgatggcattc

SEQ ID NO: 1896106 - DNA, 15 bp, Homo sapiens
gattgatggcattct

SEQ ID NO: 1896107 - DNA, 15 bp, Homo sapiens
attgatggcattctc

SEQ ID NO: 1896108 - DNA, 15 bp, Homo sapiens
ttgatggcattctcc

SEQ ID NO: 1896109 - DNA, 15 bp, Homo sapiens
tgatggcattctccc

SEQ ID NO: 1896110 - DNA, 15 bp, Homo sapiens
gatggcattctcccg

SEQ ID NO: 1896111 - DNA, 15 bp, Homo sapiens
atggcattctcccgt

SEQ ID NO: 1896112 - DNA, 15 bp, Homo sapiens
tggcattctcccgtc

SEQ ID NO: 1896113 - DNA, 15 bp, Homo sapiens
ggcattctcccgtct

SEQ ID NO: 1896114 - DNA, 15 bp, Homo sapiens
gcattctcccgtctc

SEQ ID NO: 1896115 - DNA, 15 bp, Homo sapiens
cattctcccgtctcc

SEQ ID NO: 1896116 - DNA, 15 bp, Homo sapiens
attctcccgtctcct

SEQ ID NO: 1896117 - DNA, 15 bp, Homo sapiens
ttctcccgtctcctt

SEQ ID NO: 1896118 - DNA, 15 bp, Homo sapiens
tctcccgtctccttc

SEQ ID NO: 1896119 - DNA, 15 bp, Homo sapiens
ctcccgtctccttcc

SEQ ID NO: 1896120 - DNA, 15 bp, Homo sapiens
tcccgtctccttcca

SEQ ID NO: 1896121 - DNA, 15 bp, Homo sapiens
cccgtctccttccag

SEQ ID NO: 1896122 - DNA, 15 bp, Homo sapiens
ccgtctccttccagg

SEQ ID NO: 1896123 - DNA, 15 bp, Homo sapiens
cgtctccttccaggg

SEQ ID NO: 1896124 - DNA, 15 bp, Homo sapiens
gtctccttccaggga

SEQ ID NO: 1896125 - DNA, 15 bp, Homo sapiens
tctccttccagggac

SEQ ID NO: 1896126 - DNA, 15 bp, Homo sapiens
ctccttccagggaca

SEQ ID NO: 1896127 - DNA, 15 bp, Homo sapiens
tccttccagggacac

SEQ ID NO: 1896128 - DNA, 15 bp, Homo sapiens
ccttccagggacact

SEQ ID NO: 1896129 - DNA, 15 bp, Homo sapiens
cttccagggacactg

SEQ ID NO: 1896130 - DNA, 15 bp, Homo sapiens
ttccagggacactgc

SEQ ID NO: 1896131 - DNA, 15 bp, Homo sapiens
tccagggacactgct

SEQ ID NO: 1896132 - DNA, 15 bp, Homo sapiens
ccagggacactgctt

SEQ ID NO: 1896133 - DNA, 15 bp, Homo sapiens
cagggacactgcttg

SEQ ID NO: 1896134 - DNA, 15 bp, Homo sapiens
agggacactgcttgg

SEQ ID NO: 1896135 - DNA, 15 bp, Homo sapiens
gggacactgcttgga

SEQ ID NO: 1896136 - DNA, 15 bp, Homo sapiens
ggacactgcttggaa

SEQ ID NO: 1896137 - DNA, 15 bp, Homo sapiens
gacactgcttggaaa

SEQ ID NO: 1896138 - DNA, 15 bp, Homo sapiens
acactgcttggaaag

SEQ ID NO: 1896139 - DNA, 15 bp, Homo sapiens
cactgcttggaaagc

SEQ ID NO: 1896140 - DNA, 15 bp, Homo sapiens
actgcttggaaagct

SEQ ID NO: 1896141 - DNA, 15 bp, Homo sapiens
ctgcttggaaagctg

SEQ ID NO: 1896142 - DNA, 15 bp, Homo sapiens
tgcttggaaagctga

SEQ ID NO: 1896143 - DNA, 15 bp, Homo sapiens
gcttggaaagctgaa

SEQ ID NO: 1896144 - DNA, 15 bp, Homo sapiens
cttggaaagctgaac

SEQ ID NO: 1896145 - DNA, 15 bp, Homo sapiens
ttggaaagctgaacc

SEQ ID NO: 1896146 - DNA, 15 bp, Homo sapiens
tggaaagctgaacct

SEQ ID NO: 1896147 - DNA, 15 bp, Homo sapiens
ggaaagctgaacctt

SEQ ID NO: 1896148 - DNA, 15 bp, Homo sapiens
gaaagctgaaccttc

SEQ ID NO: 1896149 - DNA, 15 bp, Homo sapiens
aaagctgaaccttcg

SEQ ID NO: 1896150 - DNA, 15 bp, Homo sapiens
aagctgaaccttcga

SEQ ID NO: 1896151 - DNA, 15 bp, Homo sapiens
agctgaaccttcgag

SEQ ID NO: 1896152 - DNA, 15 bp, Homo sapiens
gctgaaccttcgagc

SEQ ID NO: 1896153 - DNA, 15 bp, Homo sapiens
ctgaaccttcgagca

SEQ ID NO: 1896154 - DNA, 15 bp, Homo sapiens
tgaaccttcgagcag

SEQ ID NO: 1896155 - DNA, 15 bp, Homo sapiens
gaaccttcgagcagc

SEQ ID NO: 1896156 - DNA, 15 bp, Homo sapiens
aaccttcgagcagcc

SEQ ID NO: 1896157 - DNA, 15 bp, Homo sapiens
accttcgagcagcca

SEQ ID NO: 1896158 - DNA, 15 bp, Homo sapiens
ccttcgagcagccac

SEQ ID NO: 1896159 - DNA, 15 bp, Homo sapiens
cttcgagcagccact

SEQ ID NO: 1896160 - DNA, 15 bp, Homo sapiens
ttcgagcagccactt

SEQ ID NO: 1896161 - DNA, 15 bp, Homo sapiens
tcgagcagccacttg

SEQ ID NO: 1896162 - DNA, 15 bp, Homo sapiens
cgagcagccacttgc

SEQ ID NO: 1896163 - DNA, 15 bp, Homo sapiens
gagcagccacttgca

SEQ ID NO: 1896164 - DNA, 15 bp, Homo sapiens
agcagccacttgcag

SEQ ID NO: 1896165 - DNA, 15 bp, Homo sapiens
gcagccacttgcagc

SEQ ID NO: 1896166 - DNA, 15 bp, Homo sapiens
cagccacttgcagct

SEQ ID NO: 1896167 - DNA, 15 bp, Homo sapiens
agccacttgcagctg

SEQ ID NO: 1896168 - DNA, 15 bp, Homo sapiens
gccacttgcagctgc

SEQ ID NO: 1896169 - DNA, 15 bp, Homo sapiens
ccacttgcagctgca

SEQ ID NO: 1896170 - DNA, 15 bp, Homo sapiens
cacttgcagctgcat

SEQ ID NO: 1896171 - DNA, 15 bp, Homo sapiens
acttgcagctgcatg

SEQ ID NO: 1896172 - DNA, 15 bp, Homo sapiens
cttgcagctgcatgg

SEQ ID NO: 1896173 - DNA, 15 bp, Homo sapiens
ttgcagctgcatggt

SEQ ID NO: 1896174 - DNA, 15 bp, Homo sapiens
tgcagctgcatggtg

SEQ ID NO: 1896175 - DNA, 15 bp, Homo sapiens
gcagctgcatggtgt

SEQ ID NO: 1896176 - DNA, 15 bp, Homo sapiens
cagctgcatggtgtg

SEQ ID NO: 1896177 - DNA, 15 bp, Homo sapiens
agctgcatggtgtgc

SEQ ID NO: 1896178 - DNA, 15 bp, Homo sapiens
gctgcatggtgtgcc

SEQ ID NO: 1896179 - DNA, 15 bp, Homo sapiens
ctgcatggtgtgcca

SEQ ID NO: 1896180 - DNA, 15 bp, Homo sapiens
tgcatggtgtgccat

SEQ ID NO: 1896181 - DNA, 15 bp, Homo sapiens
gcatggtgtgccatc

SEQ ID NO: 1896182 - DNA, 15 bp, Homo sapiens
catggtgtgccatca

SEQ ID NO: 1896183 - DNA, 15 bp, Homo sapiens
atggtgtgccatcac

SEQ ID NO: 1896184 - DNA, 15 bp, Homo sapiens
tggtgtgccatcaca

SEQ ID NO: 1896185 - DNA, 15 bp, Homo sapiens
ggtgtgccatcacag

SEQ ID NO: 1896186 - DNA, 15 bp, Homo sapiens
gtgtgccatcacagc

SEQ ID NO: 1896187 - DNA, 15 bp, Homo sapiens
tgtgccatcacagct

SEQ ID NO: 1896188 - DNA, 15 bp, Homo sapiens
gtgccatcacagctg

SEQ ID NO: 1896189 - DNA, 15 bp, Homo sapiens
tgccatcacagctgt

SEQ ID NO: 1896190 - DNA, 15 bp, Homo sapiens
gccatcacagctgtt

SEQ ID NO: 1896191 - DNA, 15 bp, Homo sapiens
ccatcacagctgttc

SEQ ID NO: 1896192 - DNA, 15 bp, Homo sapiens
catcacagctgttca

SEQ ID NO: 1896193 - DNA, 15 bp, Homo sapiens
atcacagctgttcag

SEQ ID NO: 1896194 - DNA, 15 bp, Homo sapiens
tcacagctgttcagg

SEQ ID NO: 1896195 - DNA, 15 bp, Homo sapiens
cacagctgttcaggt

SEQ ID NO: 1896196 - DNA, 15 bp, Homo sapiens
acagctgttcaggtg

SEQ ID NO: 1896197 - DNA, 15 bp, Homo sapiens
cagctgttcaggtgg

SEQ ID NO: 1896198 - DNA, 15 bp, Homo sapiens
agctgttcaggtgga

SEQ ID NO: 1896199 - DNA, 15 bp, Homo sapiens
gctgttcaggtggaa

SEQ ID NO: 1896200 - DNA, 15 bp, Homo sapiens
ctgttcaggtggaag

SEQ ID NO: 1896201 - DNA, 15 bp, Homo sapiens
tgttcaggtggaagc

SEQ ID NO: 1896202 - DNA, 15 bp, Homo sapiens
gttcaggtggaagct

SEQ ID NO: 1896203 - DNA, 15 bp, Homo sapiens
ttcaggtggaagctt

SEQ ID NO: 1896204 - DNA, 15 bp, Homo sapiens
tcaggtggaagcttt

SEQ ID NO: 1896205 - DNA, 15 bp, Homo sapiens
caggtggaagctttt

SEQ ID NO: 1896206 - DNA, 15 bp, Homo sapiens
aggtggaagcttttc

SEQ ID NO: 1896207 - DNA, 15 bp, Homo sapiens
ggtggaagcttttca

SEQ ID NO: 1896208 - DNA, 15 bp, Homo sapiens
gtggaagcttttcag

SEQ ID NO: 1896209 - DNA, 15 bp, Homo sapiens
tggaagcttttcagg

SEQ ID NO: 1896210 - DNA, 15 bp, Homo sapiens
ggaagcttttcagga

SEQ ID NO: 1896211 - DNA, 15 bp, Homo sapiens
gaagcttttcaggaa

SEQ ID NO: 1896212 - DNA, 15 bp, Homo sapiens
aagcttttcaggaat

SEQ ID NO: 1896213 - DNA, 15 bp, Homo sapiens
agcttttcaggaatc

SEQ ID NO: 1896214 - DNA, 15 bp, Homo sapiens
gcttttcaggaatca

SEQ ID NO: 1896215 - DNA, 15 bp, Homo sapiens
cttttcaggaatcag

SEQ ID NO: 1896216 - DNA, 15 bp, Homo sapiens
ttttcaggaatcagt

SEQ ID NO: 1896217 - DNA, 15 bp, Homo sapiens
tttcaggaatcagtg

SEQ ID NO: 1896218 - DNA, 15 bp, Homo sapiens
ttcaggaatcagtgg

SEQ ID NO: 1896219 - DNA, 15 bp, Homo sapiens
tcaggaatcagtggt

SEQ ID NO: 1896220 - DNA, 15 bp, Homo sapiens
caggaatcagtggtt

SEQ ID NO: 1896221 - DNA, 15 bp, Homo sapiens
aggaatcagtggttt

SEQ ID NO: 1896222 - DNA, 15 bp, Homo sapiens
ggaatcagtggtttc

SEQ ID NO: 1896223 - DNA, 15 bp, Homo sapiens
gaatcagtggtttcc

SEQ ID NO: 1896224 - DNA, 15 bp, Homo sapiens
aatcagtggtttccc

SEQ ID NO: 1896225 - DNA, 15 bp, Homo sapiens
atcagtggtttccct

SEQ ID NO: 1896226 - DNA, 15 bp, Homo sapiens
tcagtggtttccctg

SEQ ID NO: 1896227 - DNA, 15 bp, Homo sapiens
cagtggtttccctgg

SEQ ID NO: 1896228 - DNA, 15 bp, Homo sapiens
agtggtttccctggc

SEQ ID NO: 1896229 - DNA, 15 bp, Homo sapiens
gtggtttccctggct

SEQ ID NO: 1896230 - DNA, 15 bp, Homo sapiens
tggtttccctggctc

SEQ ID NO: 1896231 - DNA, 15 bp, Homo sapiens
ggtttccctggctct

SEQ ID NO: 1896232 - DNA, 15 bp, Homo sapiens
gtttccctggctcta

SEQ ID NO: 1896233 - DNA, 15 bp, Homo sapiens
tttccctggctctac

SEQ ID NO: 1896234 - DNA, 15 bp, Homo sapiens
ttccctggctctacc

SEQ ID NO: 1896235 - DNA, 15 bp, Homo sapiens
tccctggctctacct

SEQ ID NO: 1896236 - DNA, 15 bp, Homo sapiens
ccctggctctacctt

SEQ ID NO: 1896237 - DNA, 15 bp, Homo sapiens
cctggctctaccttg

SEQ ID NO: 1896238 - DNA, 15 bp, Homo sapiens
ctggctctaccttgg

SEQ ID NO: 1896239 - DNA, 15 bp, Homo sapiens
tggctctaccttgga

SEQ ID NO: 1896240 - DNA, 15 bp, Homo sapiens
ggctctaccttggaa

SEQ ID NO: 1896241 - DNA, 15 bp, Homo sapiens
gctctaccttggaat

SEQ ID NO: 1896242 - DNA, 15 bp, Homo sapiens
ctctaccttggaatc

SEQ ID NO: 1896243 - DNA, 15 bp, Homo sapiens
tctaccttggaatca

SEQ ID NO: 1896244 - DNA, 15 bp, Homo sapiens
ctaccttggaatcat

SEQ ID NO: 1896245 - DNA, 15 bp, Homo sapiens
taccttggaatcatc

SEQ ID NO: 1896246 - DNA, 15 bp, Homo sapiens
accttggaatcatcg

SEQ ID NO: 1896247 - DNA, 15 bp, Homo sapiens
ccttggaatcatcga

SEQ ID NO: 1896248 - DNA, 15 bp, Homo sapiens
cttggaatcatcgaa

SEQ ID NO: 1896249 - DNA, 15 bp, Homo sapiens
ttggaatcatcgaaa

SEQ ID NO: 1896250 - DNA, 15 bp, Homo sapiens
tggaatcatcgaaaa

SEQ ID NO: 1896251 - DNA, 15 bp, Homo sapiens
ggaatcatcgaaaaa

SEQ ID NO: 1896252 - DNA, 15 bp, Homo sapiens
gaatcatcgaaaaac

SEQ ID NO: 1896253 - DNA, 15 bp, Homo sapiens
aatcatcgaaaaact

SEQ ID NO: 1896254 - DNA, 15 bp, Homo sapiens
atcatcgaaaaactt

SEQ ID NO: 1896255 - DNA, 15 bp, Homo sapiens
tcatcgaaaaactta

SEQ ID NO: 1896256 - DNA, 15 bp, Homo sapiens
catcgaaaaacttaa

SEQ ID NO: 1896257 - DNA, 15 bp, Homo sapiens
atcgaaaaacttaaa

SEQ ID NO: 1896258 - DNA, 15 bp, Homo sapiens
tcgaaaaacttaaaa

SEQ ID NO: 1896259 - DNA, 15 bp, Homo sapiens
cgaaaaacttaaaag

SEQ ID NO: 1896260 - DNA, 15 bp, Homo sapiens
gaaaaacttaaaagt

SEQ ID NO: 1896261 - DNA, 15 bp, Homo sapiens
aaaaacttaaaagtt

SEQ ID NO: 1896262 - DNA, 15 bp, Homo sapiens
aaaacttaaaagtta

SEQ ID NO: 1896263 - DNA, 15 bp, Homo sapiens
aaacttaaaagttac

SEQ ID NO: 1896264 - DNA, 15 bp, Homo sapiens
aacttaaaagttact

SEQ ID NO: 1896265 - DNA, 15 bp, Homo sapiens
acttaaaagttactg

SEQ ID NO: 1896266 - DNA, 15 bp, Homo sapiens
cttaaaagttactga

SEQ ID NO: 1896267 - DNA, 15 bp, Homo sapiens
ttaaaagttactgag

SEQ ID NO: 1896268 - DNA, 15 bp, Homo sapiens
taaaagttactgagg

SEQ ID NO: 1896269 - DNA, 15 bp, Homo sapiens
aaaagttactgaggc

SEQ ID NO: 1896270 - DNA, 15 bp, Homo sapiens
aaagttactgaggcc

SEQ ID NO: 1896271 - DNA, 15 bp, Homo sapiens
aagttactgaggcct

SEQ ID NO: 1896272 - DNA, 15 bp, Homo sapiens
agttactgaggcctg

SEQ ID NO: 1896273 - DNA, 15 bp, Homo sapiens
gttactgaggcctgt

SEQ ID NO: 1896274 - DNA, 15 bp, Homo sapiens
ttactgaggcctgtc

SEQ ID NO: 1896275 - DNA, 15 bp, Homo sapiens
tactgaggcctgtcc

SEQ ID NO: 1896276 - DNA, 15 bp, Homo sapiens
actgaggcctgtccc

SEQ ID NO: 1896277 - DNA, 15 bp, Homo sapiens
ctgaggcctgtcccc

SEQ ID NO: 1896278 - DNA, 15 bp, Homo sapiens
tgaggcctgtcccca

SEQ ID NO: 1896279 - DNA, 15 bp, Homo sapiens
gaggcctgtccccac

SEQ ID NO: 1896280 - DNA, 15 bp, Homo sapiens
aggcctgtccccaca

SEQ ID NO: 1896281 - DNA, 15 bp, Homo sapiens
ggcctgtccccacaa

SEQ ID NO: 1896282 - DNA, 15 bp, Homo sapiens
gcctgtccccacaac

SEQ ID NO: 1896283 - DNA, 15 bp, Homo sapiens
cctgtccccacaacc

SEQ ID NO: 1896284 - DNA, 15 bp, Homo sapiens
ctgtccccacaaccg

SEQ ID NO: 1896285 - DNA, 15 bp, Homo sapiens
tgtccccacaaccgg

SEQ ID NO: 1896286 - DNA, 15 bp, Homo sapiens
gtccccacaaccgga

SEQ ID NO: 1896287 - DNA, 15 bp, Homo sapiens
tccccacaaccggaa

SEQ ID NO: 1896288 - DNA, 15 bp, Homo sapiens
ccccacaaccggaac

SEQ ID NO: 1896289 - DNA, 15 bp, Homo sapiens
cccacaaccggaact

SEQ ID NO: 1896290 - DNA, 15 bp, Homo sapiens
ccacaaccggaactt

SEQ ID NO: 1896291 - DNA, 15 bp, Homo sapiens
cacaaccggaacttt

SEQ ID NO: 1896292 - DNA, 15 bp, Homo sapiens
acaaccggaactttc

SEQ ID NO: 1896293 - DNA, 15 bp, Homo sapiens
caaccggaactttct

SEQ ID NO: 1896294 - DNA, 15 bp, Homo sapiens
aaccggaactttctt

SEQ ID NO: 1896295 - DNA, 15 bp, Homo sapiens
accggaactttcttg

SEQ ID NO: 1896296 - DNA, 15 bp, Homo sapiens
ccggaactttcttgg

SEQ ID NO: 1896297 - DNA, 15 bp, Homo sapiens
cggaactttcttggt

SEQ ID NO: 1896298 - DNA, 15 bp, Homo sapiens
ggaactttcttggtc

SEQ ID NO: 1896299 - DNA, 15 bp, Homo sapiens
gaactttcttggtct

SEQ ID NO: 1896300 - DNA, 15 bp, Homo sapiens
aactttcttggtctg

SEQ ID NO: 1896301 - DNA, 15 bp, Homo sapiens
actttcttggtctgg

SEQ ID NO: 1896302 - DNA, 15 bp, Homo sapiens
ctttcttggtctggg

SEQ ID NO: 1896303 - DNA, 15 bp, Homo sapiens
tttcttggtctgggg

SEQ ID NO: 1896304 - DNA, 15 bp, Homo sapiens
ttcttggtctggggt

SEQ ID NO: 1896305 - DNA, 15 bp, Homo sapiens
tcttggtctggggtc

SEQ ID NO: 1896306 - DNA, 15 bp, Homo sapiens
cttggtctggggtcc

SEQ ID NO: 1896307 - DNA, 15 bp, Homo sapiens
ttggtctggggtccg

SEQ ID NO: 1896308 - DNA, 15 bp, Homo sapiens
tggtctggggtccgc

SEQ ID NO: 1896309 - DNA, 15 bp, Homo sapiens
ggtctggggtccgca

SEQ ID NO: 1896310 - DNA, 15 bp, Homo sapiens
gtctggggtccgcat

SEQ ID NO: 1896311 - DNA, 15 bp, Homo sapiens
tctggggtccgcatg

SEQ ID NO: 1896312 - DNA, 15 bp, Homo sapiens
ctggggtccgcatgg

SEQ ID NO: 1896313 - DNA, 15 bp, Homo sapiens
tggggtccgcatggg

SEQ ID NO: 1896314 - DNA, 15 bp, Homo sapiens
ggggtccgcatgggc

SEQ ID NO: 1896315 - DNA, 15 bp, Homo sapiens
gggtccgcatgggca

SEQ ID NO: 1896316 - DNA, 15 bp, Homo sapiens
ggtccgcatgggcaa

SEQ ID NO: 1896317 - DNA, 15 bp, Homo sapiens
gtccgcatgggcaac

SEQ ID NO: 1896318 - DNA, 15 bp, Homo sapiens
tccgcatgggcaact

SEQ ID NO: 1896319 - DNA, 15 bp, Homo sapiens
ccgcatgggcaactc

SEQ ID NO: 1896320 - DNA, 15 bp, Homo sapiens
cgcatgggcaactca

SEQ ID NO: 1896321 - DNA, 15 bp, Homo sapiens
gcatgggcaactcag

SEQ ID NO: 1896322 - DNA, 15 bp, Homo sapiens
catgggcaactcagt

SEQ ID NO: 1896323 - DNA, 15 bp, Homo sapiens
atgggcaactcagtt

SEQ ID NO: 1896324 - DNA, 15 bp, Homo sapiens
tgggcaactcagttg

SEQ ID NO: 1896325 - DNA, 15 bp, Homo sapiens
gggcaactcagttgt

SEQ ID NO: 1896326 - DNA, 15 bp, Homo sapiens
ggcaactcagttgtc

SEQ ID NO: 1896327 - DNA, 15 bp, Homo sapiens
gcaactcagttgtca

SEQ ID NO: 1896328 - DNA, 15 bp, Homo sapiens
caactcagttgtcaa

SEQ ID NO: 1896329 - DNA, 15 bp, Homo sapiens
aactcagttgtcaag

SEQ ID NO: 1896330 - DNA, 15 bp, Homo sapiens
actcagttgtcaagc

SEQ ID NO: 1896331 - DNA, 15 bp, Homo sapiens
ctcagttgtcaagca

SEQ ID NO: 1896332 - DNA, 15 bp, Homo sapiens
tcagttgtcaagcac

SEQ ID NO: 1896333 - DNA, 15 bp, Homo sapiens
cagttgtcaagcact

SEQ ID NO: 1896334 - DNA, 15 bp, Homo sapiens
agttgtcaagcactc

SEQ ID NO: 1896335 - DNA, 15 bp, Homo sapiens
gttgtcaagcactcc

SEQ ID NO: 1896336 - DNA, 15 bp, Homo sapiens
ttgtcaagcactccc

SEQ ID NO: 1896337 - DNA, 15 bp, Homo sapiens
tgtcaagcactcccc

SEQ ID NO: 1896338 - DNA, 15 bp, Homo sapiens
gtcaagcactcccct

SEQ ID NO: 1896339 - DNA, 15 bp, Homo sapiens
tcaagcactcccctg

SEQ ID NO: 1896340 - DNA, 15 bp, Homo sapiens
caagcactcccctgg

SEQ ID NO: 1896341 - DNA, 15 bp, Homo sapiens
aagcactcccctggt

SEQ ID NO: 1896342 - DNA, 15 bp, Homo sapiens
agcactcccctggtg

SEQ ID NO: 1896343 - DNA, 15 bp, Homo sapiens
gcactcccctggtga

SEQ ID NO: 1896344 - DNA, 15 bp, Homo sapiens
cactcccctggtgat

SEQ ID NO: 1896345 - DNA, 15 bp, Homo sapiens
actcccctggtgatg

SEQ ID NO: 1896346 - DNA, 15 bp, Homo sapiens
ctcccctggtgatgc

SEQ ID NO: 1896347 - DNA, 15 bp, Homo sapiens
tcccctggtgatgcg

SEQ ID NO: 1896348 - DNA, 15 bp, Homo sapiens
cccctggtgatgcgg

SEQ ID NO: 1896349 - DNA, 15 bp, Homo sapiens
ccctggtgatgcgga

SEQ ID NO: 1896350 - DNA, 15 bp, Homo sapiens
cctggtgatgcggat

SEQ ID NO: 1896351 - DNA, 15 bp, Homo sapiens
ctggtgatgcggatg

SEQ ID NO: 1896352 - DNA, 15 bp, Homo sapiens
tggtgatgcggatgt

SEQ ID NO: 1896353 - DNA, 15 bp, Homo sapiens
ggtgatgcggatgta

SEQ ID NO: 1896354 - DNA, 15 bp, Homo sapiens
gtgatgcggatgtac

SEQ ID NO: 1896355 - DNA, 15 bp, Homo sapiens
tgatgcggatgtaca

SEQ ID NO: 1896356 - DNA, 15 bp, Homo sapiens
gatgcggatgtacaa

SEQ ID NO: 1896357 - DNA, 15 bp, Homo sapiens
atgcggatgtacaac

SEQ ID NO: 1896358 - DNA, 15 bp, Homo sapiens
tgcggatgtacaacc

SEQ ID NO: 1896359 - DNA, 15 bp, Homo sapiens
gcggatgtacaacca

SEQ ID NO: 1896360 - DNA, 15 bp, Homo sapiens
cggatgtacaaccag

SEQ ID NO: 1896361 - DNA, 15 bp, Homo sapiens
ggatgtacaaccagt

SEQ ID NO: 1896362 - DNA, 15 bp, Homo sapiens
gatgtacaaccagtg

SEQ ID NO: 1896363 - DNA, 15 bp, Homo sapiens
atgtacaaccagtgt

SEQ ID NO: 1896364 - DNA, 15 bp, Homo sapiens
tgtacaaccagtgta

SEQ ID NO: 1896365 - DNA, 15 bp, Homo sapiens
gtacaaccagtgtat

SEQ ID NO: 1896366 - DNA, 15 bp, Homo sapiens
tacaaccagtgtatt

SEQ ID NO: 1896367 - DNA, 15 bp, Homo sapiens
acaaccagtgtattg

SEQ ID NO: 1896368 - DNA, 15 bp, Homo sapiens
caaccagtgtattga

SEQ ID NO: 1896369 - DNA, 15 bp, Homo sapiens
aaccagtgtattgaa

SEQ ID NO: 1896370 - DNA, 15 bp, Homo sapiens
accagtgtattgaat

SEQ ID NO: 1896371 - DNA, 15 bp, Homo sapiens
ccagtgtattgaata

SEQ ID NO: 1896372 - DNA, 15 bp, Homo sapiens
cagtgtattgaatag

SEQ ID NO: 1896373 - DNA, 15 bp, Homo sapiens
agtgtattgaataga

SEQ ID NO: 1896374 - DNA, 15 bp, Homo sapiens
gtgtattgaatagaa

SEQ ID NO: 1896375 - DNA, 15 bp, Homo sapiens
tgtattgaatagaat

SEQ ID NO: 1896376 - DNA, 15 bp, Homo sapiens
gtattgaatagaatg

SEQ ID NO: 1896377 - DNA, 15 bp, Homo sapiens
tattgaatagaatga

SEQ ID NO: 1896378 - DNA, 15 bp, Homo sapiens
attgaatagaatgaa

SEQ ID NO: 1896379 - DNA, 15 bp, Homo sapiens
ttgaatagaatgaat

SEQ ID NO: 1896380 - DNA, 15 bp, Homo sapiens
tgaatagaatgaata

SEQ ID NO: 1896381 - DNA, 15 bp, Homo sapiens
gaatagaatgaataa

SEQ ID NO: 1896382 - DNA, 15 bp, Homo sapiens
aatagaatgaataat

SEQ ID NO: 1896383 - DNA, 15 bp, Homo sapiens
atagaatgaataatt

SEQ ID NO: 1896384 - DNA, 15 bp, Homo sapiens
tagaatgaataattg

SEQ ID NO: 1896385 - DNA, 15 bp, Homo sapiens
agaatgaataattgc

SEQ ID NO: 1896386 - DNA, 15 bp, Homo sapiens
gaatgaataattgcc

SEQ ID NO: 1896387 - DNA, 15 bp, Homo sapiens
aatgaataattgcct

SEQ ID NO: 1896388 - DNA, 15 bp, Homo sapiens
atgaataattgcctg

SEQ ID NO: 1896389 - DNA, 15 bp, Homo sapiens
tgaataattgcctga

SEQ ID NO: 1896390 - DNA, 15 bp, Homo sapiens
gaataattgcctgag

SEQ ID NO: 1896391 - DNA, 15 bp, Homo sapiens
aataattgcctgagc

SEQ ID NO: 1896392 - DNA, 15 bp, Homo sapiens
ataattgcctgagcc

SEQ ID NO: 1896393 - DNA, 15 bp, Homo sapiens
taattgcctgagcct

SEQ ID NO: 1896394 - DNA, 15 bp, Homo sapiens
aattgcctgagcctg

SEQ ID NO: 1896395 - DNA, 15 bp, Homo sapiens
attgcctgagcctgc

SEQ ID NO: 1896396 - DNA, 15 bp, Homo sapiens
ttgcctgagcctgct

SEQ ID NO: 1896397 - DNA, 15 bp, Homo sapiens
tgcctgagcctgctt

SEQ ID NO: 1896398 - DNA, 15 bp, Homo sapiens
gcctgagcctgcttt

SEQ ID NO: 1896399 - DNA, 15 bp, Homo sapiens
cctgagcctgcttta

SEQ ID NO: 1896400 - DNA, 15 bp, Homo sapiens
ctgagcctgctttaa

SEQ ID NO: 1896401 - DNA, 15 bp, Homo sapiens
tgagcctgctttaac

SEQ ID NO: 1896402 - DNA, 15 bp, Homo sapiens
gagcctgctttaacc

SEQ ID NO: 1896403 - DNA, 15 bp, Homo sapiens
agcctgctttaacca

SEQ ID NO: 1896404 - DNA, 15 bp, Homo sapiens
gcctgctttaaccag

SEQ ID NO: 1896405 - DNA, 15 bp, Homo sapiens
cctgctttaaccagc

SEQ ID NO: 1896406 - DNA, 15 bp, Homo sapiens
ctgctttaaccagca

SEQ ID NO: 1896407 - DNA, 15 bp, Homo sapiens
tgctttaaccagcaa

SEQ ID NO: 1896408 - DNA, 15 bp, Homo sapiens
gctttaaccagcaag

SEQ ID NO: 1896409 - DNA, 15 bp, Homo sapiens
ctttaaccagcaagg

SEQ ID NO: 1896410 - DNA, 15 bp, Homo sapiens
tttaaccagcaaggg

SEQ ID NO: 1896411 - DNA, 15 bp, Homo sapiens
ttaaccagcaagggg

SEQ ID NO: 1896412 - DNA, 15 bp, Homo sapiens
taaccagcaagggga

SEQ ID NO: 1896413 - DNA, 15 bp, Homo sapiens
aaccagcaaggggat

SEQ ID NO: 1896414 - DNA, 15 bp, Homo sapiens
accagcaaggggatt

SEQ ID NO: 1896415 - DNA, 15 bp, Homo sapiens
ccagcaaggggattg

SEQ ID NO: 1896416 - DNA, 15 bp, Homo sapiens
cagcaaggggattgg

SEQ ID NO: 1896417 - DNA, 15 bp, Homo sapiens
agcaaggggattggc

SEQ ID NO: 1896418 - DNA, 15 bp, Homo sapiens
gcaaggggattggca

SEQ ID NO: 1896419 - DNA, 15 bp, Homo sapiens
caaggggattggcaa

SEQ ID NO: 1896420 - DNA, 15 bp, Homo sapiens
aaggggattggcaat

SEQ ID NO: 1896421 - DNA, 15 bp, Homo sapiens
aggggattggcaatg

SEQ ID NO: 1896422 - DNA, 15 bp, Homo sapiens
ggggattggcaatgc

SEQ ID NO: 1896423 - DNA, 15 bp, Homo sapiens
gggattggcaatgca

SEQ ID NO: 1896424 - DNA, 15 bp, Homo sapiens
ggattggcaatgcag

SEQ ID NO: 1896425 - DNA, 15 bp, Homo sapiens
gattggcaatgcaga

SEQ ID NO: 1896426 - DNA, 15 bp, Homo sapiens
attggcaatgcagag

SEQ ID NO: 1896427 - DNA, 15 bp, Homo sapiens
ttggcaatgcagagg

SEQ ID NO: 1896428 - DNA, 15 bp, Homo sapiens
tggcaatgcagaggg

SEQ ID NO: 1896429 - DNA, 15 bp, Homo sapiens
ggcaatgcagaggga

SEQ ID NO: 1896430 - DNA, 15 bp, Homo sapiens
gcaatgcagagggaa

SEQ ID NO: 1896431 - DNA, 15 bp, Homo sapiens
caatgcagagggaag

SEQ ID NO: 1896432 - DNA, 15 bp, Homo sapiens
aatgcagagggaagg

SEQ ID NO: 1896433 - DNA, 15 bp, Homo sapiens
atgcagagggaagga

SEQ ID NO: 1896434 - DNA, 15 bp, Homo sapiens
tgcagagggaaggat

SEQ ID NO: 1896435 - DNA, 15 bp, Homo sapiens
gcagagggaaggata

SEQ ID NO: 1896436 - DNA, 15 bp, Homo sapiens
cagagggaaggatag

SEQ ID NO: 1896437 - DNA, 15 bp, Homo sapiens
agagggaaggatagt

SEQ ID NO: 1896438 - DNA, 15 bp, Homo sapiens
gagggaaggatagtg

SEQ ID NO: 1896439 - DNA, 15 bp, Homo sapiens
agggaaggatagtga

SEQ ID NO: 1896440 - DNA, 15 bp, Homo sapiens
gggaaggatagtgac

SEQ ID NO: 1896441 - DNA, 15 bp, Homo sapiens
ggaaggatagtgact

SEQ ID NO: 1896442 - DNA, 15 bp, Homo sapiens
gaaggatagtgacta

SEQ ID NO: 1896443 - DNA, 15 bp, Homo sapiens
aaggatagtgactag

SEQ ID NO: 1896444 - DNA, 15 bp, Homo sapiens
aggatagtgactaga

SEQ ID NO: 1896445 - DNA, 15 bp, Homo sapiens
ggatagtgactagaa

SEQ ID NO: 1896446 - DNA, 15 bp, Homo sapiens
gatagtgactagaat

SEQ ID NO: 1896447 - DNA, 15 bp, Homo sapiens
atagtgactagaata

SEQ ID NO: 1896448 - DNA, 15 bp, Homo sapiens
tagtgactagaatac

SEQ ID NO: 1896449 - DNA, 15 bp, Homo sapiens
agtgactagaataca

SEQ ID NO: 1896450 - DNA, 15 bp, Homo sapiens
gtgactagaatacac

SEQ ID NO: 1896451 - DNA, 15 bp, Homo sapiens
tgactagaatacacc

SEQ ID NO: 1896452 - DNA, 15 bp, Homo sapiens
gactagaatacacct

SEQ ID NO: 1896453 - DNA, 15 bp, Homo sapiens
actagaatacacctg

SEQ ID NO: 1896454 - DNA, 15 bp, Homo sapiens
ctagaatacacctgg

SEQ ID NO: 1896455 - DNA, 15 bp, Homo sapiens
tagaatacacctggg

SEQ ID NO: 1896456 - DNA, 15 bp, Homo sapiens
agaatacacctgggt

SEQ ID NO: 1896457 - DNA, 15 bp, Homo sapiens
gaatacacctgggtg

SEQ ID NO: 1896458 - DNA, 15 bp, Homo sapiens
aatacacctgggtgt

SEQ ID NO: 1896459 - DNA, 15 bp, Homo sapiens
atacacctgggtgtt

SEQ ID NO: 1896460 - DNA, 15 bp, Homo sapiens
tacacctgggtgttc

SEQ ID NO: 1896461 - DNA, 15 bp, Homo sapiens
acacctgggtgttct

SEQ ID NO: 1896462 - DNA, 15 bp, Homo sapiens
cacctgggtgttctc

SEQ ID NO: 1896463 - DNA, 15 bp, Homo sapiens
acctgggtgttctct

SEQ ID NO: 1896464 - DNA, 15 bp, Homo sapiens
cctgggtgttctcta

SEQ ID NO: 1896465 - DNA, 15 bp, Homo sapiens
ctgggtgttctctag

SEQ ID NO: 1896466 - DNA, 15 bp, Homo sapiens
tgggtgttctctagg

SEQ ID NO: 1896467 - DNA, 15 bp, Homo sapiens
gggtgttctctagga

SEQ ID NO: 1896468 - DNA, 15 bp, Homo sapiens
ggtgttctctaggac

SEQ ID NO: 1896469 - DNA, 15 bp, Homo sapiens
gtgttctctaggact

SEQ ID NO: 1896470 - DNA, 15 bp, Homo sapiens
tgttctctaggactg

SEQ ID NO: 1896471 - DNA, 15 bp, Homo sapiens
gttctctaggactgg

SEQ ID NO: 1896472 - DNA, 15 bp, Homo sapiens
ttctctaggactggc

SEQ ID NO: 1896473 - DNA, 15 bp, Homo sapiens
tctctaggactggcc

SEQ ID NO: 1896474 - DNA, 15 bp, Homo sapiens
ctctaggactggccg

SEQ ID NO: 1896475 - DNA, 15 bp, Homo sapiens
tctaggactggccgt

SEQ ID NO: 1896476 - DNA, 15 bp, Homo sapiens
ctaggactggccgta

SEQ ID NO: 1896477 - DNA, 15 bp, Homo sapiens
taggactggccgtac

SEQ ID NO: 1896478 - DNA, 15 bp, Homo sapiens
aggactggccgtaca

SEQ ID NO: 1896479 - DNA, 15 bp, Homo sapiens
ggactggccgtacag

SEQ ID NO: 1896480 - DNA, 15 bp, Homo sapiens
gactggccgtacagc

SEQ ID NO: 1896481 - DNA, 15 bp, Homo sapiens
actggccgtacagct

SEQ ID NO: 1896482 - DNA, 15 bp, Homo sapiens
ctggccgtacagctg

SEQ ID NO: 1896483 - DNA, 15 bp, Homo sapiens
tggccgtacagctgt

SEQ ID NO: 1896484 - DNA, 15 bp, Homo sapiens
ggccgtacagctgtg

SEQ ID NO: 1896485 - DNA, 15 bp, Homo sapiens
gccgtacagctgtgc

SEQ ID NO: 1896486 - DNA, 15 bp, Homo sapiens
ccgtacagctgtgct

SEQ ID NO: 1896487 - DNA, 15 bp, Homo sapiens
cgtacagctgtgctt

SEQ ID NO: 1896488 - DNA, 15 bp, Homo sapiens
gtacagctgtgcttc

SEQ ID NO: 1896489 - DNA, 15 bp, Homo sapiens
tacagctgtgcttcc

SEQ ID NO: 1896490 - DNA, 15 bp, Homo sapiens
acagctgtgcttcca

SEQ ID NO: 1896491 - DNA, 15 bp, Homo sapiens
cagctgtgcttccag

SEQ ID NO: 1896492 - DNA, 15 bp, Homo sapiens
agctgtgcttccaga

SEQ ID NO: 1896493 - DNA, 15 bp, Homo sapiens
gctgtgcttccagag

SEQ ID NO: 1896494 - DNA, 15 bp, Homo sapiens
ctgtgcttccagagt

SEQ ID NO: 1896495 - DNA, 15 bp, Homo sapiens
tgtgcttccagagta

SEQ ID NO: 1896496 - DNA, 15 bp, Homo sapiens
gtgcttccagagtat

SEQ ID NO: 1896497 - DNA, 15 bp, Homo sapiens
tgcttccagagtatc

SEQ ID NO: 1896498 - DNA, 15 bp, Homo sapiens
gcttccagagtatcg

SEQ ID NO: 1896499 - DNA, 15 bp, Homo sapiens
cttccagagtatcgg

SEQ ID NO: 1896500 - DNA, 15 bp, Homo sapiens
ttccagagtatcgga

SEQ ID NO: 1896501 - DNA, 15 bp, Homo sapiens
tccagagtatcggag

SEQ ID NO: 1896502 - DNA, 15 bp, Homo sapiens
ccagagtatcggaga

SEQ ID NO: 1896503 - DNA, 15 bp, Homo sapiens
cagagtatcggagag

SEQ ID NO: 1896504 - DNA, 15 bp, Homo sapiens
agagtatcggagagg

SEQ ID NO: 1896505 - DNA, 15 bp, Homo sapiens
gagtatcggagaggg

SEQ ID NO: 1896506 - DNA, 15 bp, Homo sapiens
agtatcggagagggg

SEQ ID NO: 1896507 - DNA, 15 bp, Homo sapiens
gtatcggagaggggt

SEQ ID NO: 1896508 - DNA, 15 bp, Homo sapiens
tatcggagaggggtg

SEQ ID NO: 1896509 - DNA, 15 bp, Homo sapiens
atcggagaggggtgt

SEQ ID NO: 1896510 - DNA, 15 bp, Homo sapiens
tcggagaggggtgtt

SEQ ID NO: 1896511 - DNA, 15 bp, Homo sapiens
cggagaggggtgttc

SEQ ID NO: 1896512 - DNA, 15 bp, Homo sapiens
ggagaggggtgttca

SEQ ID NO: 1896513 - DNA, 15 bp, Homo sapiens
gagaggggtgttcat

SEQ ID NO: 1896514 - DNA, 15 bp, Homo sapiens
agaggggtgttcatt

SEQ ID NO: 1896515 - DNA, 15 bp, Homo sapiens
gaggggtgttcatta

SEQ ID NO: 1896516 - DNA, 15 bp, Homo sapiens
aggggtgttcattaa

SEQ ID NO: 1896517 - DNA, 15 bp, Homo sapiens
ggggtgttcattaag

SEQ ID NO: 1896518 - DNA, 15 bp, Homo sapiens
gggtgttcattaagg

SEQ ID NO: 1896519 - DNA, 15 bp, Homo sapiens
ggtgttcattaagga

SEQ ID NO: 1896520 - DNA, 15 bp, Homo sapiens
gtgttcattaaggat

SEQ ID NO: 1896521 - DNA, 15 bp, Homo sapiens
tgttcattaaggatg

SEQ ID NO: 1896522 - DNA, 15 bp, Homo sapiens
gttcattaaggatgt

SEQ ID NO: 1896523 - DNA, 15 bp, Homo sapiens
ttcattaaggatgtg

SEQ ID NO: 1896524 - DNA, 15 bp, Homo sapiens
tcattaaggatgtgg

SEQ ID NO: 1896525 - DNA, 15 bp, Homo sapiens
cattaaggatgtggg

SEQ ID NO: 1896526 - DNA, 15 bp, Homo sapiens
attaaggatgtggga

SEQ ID NO: 1896527 - DNA, 15 bp, Homo sapiens
ttaaggatgtgggac

SEQ ID NO: 1896528 - DNA, 15 bp, Homo sapiens
taaggatgtgggaca

SEQ ID NO: 1896529 - DNA, 15 bp, Homo sapiens
aaggatgtgggacag

SEQ ID NO: 1896530 - DNA, 15 bp, Homo sapiens
aggatgtgggacagg

SEQ ID NO: 1896531 - DNA, 15 bp, Homo sapiens
ggatgtgggacagga

SEQ ID NO: 1896532 - DNA, 15 bp, Homo sapiens
gatgtgggacaggac

SEQ ID NO: 1896533 - DNA, 15 bp, Homo sapiens
atgtgggacaggact

SEQ ID NO: 1896534 - DNA, 15 bp, Homo sapiens
tgtgggacaggactc

SEQ ID NO: 1896535 - DNA, 15 bp, Homo sapiens
gtgggacaggactca

SEQ ID NO: 1896536 - DNA, 15 bp, Homo sapiens
tgggacaggactcaa

SEQ ID NO: 1896537 - DNA, 15 bp, Homo sapiens
gggacaggactcaac

SEQ ID NO: 1896538 - DNA, 15 bp, Homo sapiens
ggacaggactcaact

SEQ ID NO: 1896539 - DNA, 15 bp, Homo sapiens
gacaggactcaactc

SEQ ID NO: 1896540 - DNA, 15 bp, Homo sapiens
acaggactcaactcg

SEQ ID NO: 1896541 - DNA, 15 bp, Homo sapiens
caggactcaactcgc

SEQ ID NO: 1896542 - DNA, 15 bp, Homo sapiens
aggactcaactcgcc

SEQ ID NO: 1896543 - DNA, 15 bp, Homo sapiens
ggactcaactcgcct

SEQ ID NO: 1896544 - DNA, 15 bp, Homo sapiens
gactcaactcgcctc

SEQ ID NO: 1896545 - DNA, 15 bp, Homo sapiens
actcaactcgcctca

SEQ ID NO: 1896546 - DNA, 15 bp, Homo sapiens
ctcaactcgcctcat

SEQ ID NO: 1896547 - DNA, 15 bp, Homo sapiens
tcaactcgcctcatt

SEQ ID NO: 1896548 - DNA, 15 bp, Homo sapiens
caactcgcctcattt

SEQ ID NO: 1896549 - DNA, 15 bp, Homo sapiens
aactcgcctcatttc

SEQ ID NO: 1896550 - DNA, 15 bp, Homo sapiens
actcgcctcatttca

SEQ ID NO: 1896551 - DNA, 15 bp, Homo sapiens
ctcgcctcatttcat

SEQ ID NO: 1896552 - DNA, 15 bp, Homo sapiens
tcgcctcatttcatg

SEQ ID NO: 1896553 - DNA, 15 bp, Homo sapiens
cgcctcatttcatgt

SEQ ID NO: 1896554 - DNA, 15 bp, Homo sapiens
gcctcatttcatgtt

SEQ ID NO: 1896555 - DNA, 15 bp, Homo sapiens
cctcatttcatgttt

SEQ ID NO: 1896556 - DNA, 15 bp, Homo sapiens
ctcatttcatgtttt

SEQ ID NO: 1896557 - DNA, 15 bp, Homo sapiens
tcatttcatgttttc

SEQ ID NO: 1896558 - DNA, 15 bp, Homo sapiens
catttcatgttttca

SEQ ID NO: 1896559 - DNA, 15 bp, Homo sapiens
atttcatgttttcaa

SEQ ID NO: 1896560 - DNA, 15 bp, Homo sapiens
tttcatgttttcaaa

SEQ ID NO: 1896561 - DNA, 15 bp, Homo sapiens
ttcatgttttcaaag

SEQ ID NO: 1896562 - DNA, 15 bp, Homo sapiens
tcatgttttcaaagc

SEQ ID NO: 1896563 - DNA, 15 bp, Homo sapiens
catgttttcaaagct

SEQ ID NO: 1896564 - DNA, 15 bp, Homo sapiens
atgttttcaaagctt

SEQ ID NO: 1896565 - DNA, 15 bp, Homo sapiens
tgttttcaaagcttt

SEQ ID NO: 1896566 - DNA, 15 bp, Homo sapiens
gttttcaaagctttg

SEQ ID NO: 1896567 - DNA, 15 bp, Homo sapiens
ttttcaaagctttgg

SEQ ID NO: 1896568 - DNA, 15 bp, Homo sapiens
tttcaaagctttggt

SEQ ID NO: 1896569 - DNA, 15 bp, Homo sapiens
ttcaaagctttggtt

SEQ ID NO: 1896570 - DNA, 15 bp, Homo sapiens
tcaaagctttggttt

SEQ ID NO: 1896571 - DNA, 15 bp, Homo sapiens
caaagctttggtttt

SEQ ID NO: 1896572 - DNA, 15 bp, Homo sapiens
aaagctttggttttg

SEQ ID NO: 1896573 - DNA, 15 bp, Homo sapiens
aagctttggttttga

SEQ ID NO: 1896574 - DNA, 15 bp, Homo sapiens
agctttggttttgag

SEQ ID NO: 1896575 - DNA, 15 bp, Homo sapiens
gctttggttttgagt

SEQ ID NO: 1896576 - DNA, 15 bp, Homo sapiens
ctttggttttgagta

SEQ ID NO: 1896577 - DNA, 15 bp, Homo sapiens
tttggttttgagtat

SEQ ID NO: 1896578 - DNA, 15 bp, Homo sapiens
ttggttttgagtata

SEQ ID NO: 1896579 - DNA, 15 bp, Homo sapiens
tggttttgagtatag

SEQ ID NO: 1896580 - DNA, 15 bp, Homo sapiens
ggttttgagtatagc

SEQ ID NO: 1896581 - DNA, 15 bp, Homo sapiens
gttttgagtatagca

SEQ ID NO: 1896582 - DNA, 15 bp, Homo sapiens
ttttgagtatagcat

SEQ ID NO: 1896583 - DNA, 15 bp, Homo sapiens
tttgagtatagcatc

SEQ ID NO: 1896584 - DNA, 15 bp, Homo sapiens
ttgagtatagcatca

SEQ ID NO: 1896585 - DNA, 15 bp, Homo sapiens
tgagtatagcatcaa

SEQ ID NO: 1896586 - DNA, 15 bp, Homo sapiens
gagtatagcatcaaa

SEQ ID NO: 1896587 - DNA, 15 bp, Homo sapiens
agtatagcatcaaat

SEQ ID NO: 1896588 - DNA, 15 bp, Homo sapiens
gtatagcatcaaatg

SEQ ID NO: 1896589 - DNA, 15 bp, Homo sapiens
tatagcatcaaatga

SEQ ID NO: 1896590 - DNA, 15 bp, Homo sapiens
atagcatcaaatgat

SEQ ID NO: 1896591 - DNA, 15 bp, Homo sapiens
tagcatcaaatgatt

SEQ ID NO: 1896592 - DNA, 15 bp, Homo sapiens
agcatcaaatgattg

SEQ ID NO: 1896593 - DNA, 15 bp, Homo sapiens
gcatcaaatgattga

SEQ ID NO: 1896594 - DNA, 15 bp, Homo sapiens
catcaaatgattgaa

SEQ ID NO: 1896595 - DNA, 15 bp, Homo sapiens
atcaaatgattgaat

SEQ ID NO: 1896596 - DNA, 15 bp, Homo sapiens
tcaaatgattgaata

SEQ ID NO: 1896597 - DNA, 15 bp, Homo sapiens
caaatgattgaataa

SEQ ID NO: 1896598 - DNA, 15 bp, Homo sapiens
aaatgattgaataaa

SEQ ID NO: 1896599 - DNA, 15 bp, Homo sapiens
aatgattgaataaaa

SEQ ID NO: 1896600 - DNA, 15 bp, Homo sapiens
atgattgaataaaat

SEQ ID NO: 1896601 - DNA, 15 bp, Homo sapiens
tgattgaataaaata

SEQ ID NO: 1896602 - DNA, 15 bp, Homo sapiens
gattgaataaaatag

SEQ ID NO: 1896603 - DNA, 15 bp, Homo sapiens
attgaataaaataga

SEQ ID NO: 1896604 - DNA, 15 bp, Homo sapiens
ttgaataaaatagaa

SEQ ID NO: 1896605 - DNA, 15 bp, Homo sapiens
tgaataaaatagaaa

SEQ ID NO: 1896606 - DNA, 15 bp, Homo sapiens
gaataaaatagaaat

SEQ ID NO: 1896607 - DNA, 15 bp, Homo sapiens
aataaaatagaaatc

SEQ ID NO: 1896608 - DNA, 15 bp, Homo sapiens
ataaaatagaaatct

SEQ ID NO: 1896609 - DNA, 15 bp, Homo sapiens
taaaatagaaatctg

SEQ ID NO: 1896610 - DNA, 15 bp, Homo sapiens
aaaatagaaatctgc

SEQ ID NO: 1896611 - DNA, 15 bp, Homo sapiens
aaatagaaatctgcc

SEQ ID NO: 1896612 - DNA, 15 bp, Homo sapiens
aatagaaatctgcct

SEQ ID NO: 1896613 - DNA, 15 bp, Homo sapiens
atagaaatctgcctt

SEQ ID NO: 1896614 - DNA, 15 bp, Homo sapiens
tagaaatctgccttt

SEQ ID NO: 1896615 - DNA, 15 bp, Homo sapiens
agaaatctgccttta

SEQ ID NO: 1896616 - DNA, 15 bp, Homo sapiens
gaaatctgcctttag

SEQ ID NO: 1896617 - DNA, 15 bp, Homo sapiens
aaatctgcctttagg

SEQ ID NO: 1896618 - DNA, 15 bp, Homo sapiens
aatctgcctttaggg

SEQ ID NO: 1896619 - DNA, 15 bp, Homo sapiens
atctgcctttagggt

SEQ ID NO: 1896620 - DNA, 15 bp, Homo sapiens
tctgcctttagggtc

SEQ ID NO: 1896621 - DNA, 15 bp, Homo sapiens
ctgcctttagggtcc

SEQ ID NO: 1896622 - DNA, 15 bp, Homo sapiens
tgcctttagggtcct

SEQ ID NO: 1896623 - DNA, 15 bp, Homo sapiens
gcctttagggtcctc

SEQ ID NO: 1896624 - DNA, 15 bp, Homo sapiens
cctttagggtcctca

SEQ ID NO: 1896625 - DNA, 15 bp, Homo sapiens
ctttagggtcctcat

SEQ ID NO: 1896626 - DNA, 15 bp, Homo sapiens
tttagggtcctcata

SEQ ID NO: 1896627 - DNA, 15 bp, Homo sapiens
ttagggtcctcatat

SEQ ID NO: 1896628 - DNA, 15 bp, Homo sapiens
tagggtcctcatatt

SEQ ID NO: 1896629 - DNA, 15 bp, Homo sapiens
agggtcctcatattt

SEQ ID NO: 1896630 - DNA, 15 bp, Homo sapiens
gggtcctcatatttt

SEQ ID NO: 1896631 - DNA, 15 bp, Homo sapiens
ggtcctcatattttc

SEQ ID NO: 1896632 - DNA, 15 bp, Homo sapiens
gtcctcatattttct

SEQ ID NO: 1896633 - DNA, 15 bp, Homo sapiens
tcctcatattttctg

SEQ ID NO: 1896634 - DNA, 15 bp, Homo sapiens
cctcatattttctgc

SEQ ID NO: 1896635 - DNA, 15 bp, Homo sapiens
ctcatattttctgct

SEQ ID NO: 1896636 - DNA, 15 bp, Homo sapiens
tcatattttctgctc

SEQ ID NO: 1896637 - DNA, 15 bp, Homo sapiens
catattttctgctct

SEQ ID NO: 1896638 - DNA, 15 bp, Homo sapiens
atattttctgctcta

SEQ ID NO: 1896639 - DNA, 15 bp, Homo sapiens
tattttctgctctac

SEQ ID NO: 1896640 - DNA, 15 bp, Homo sapiens
attttctgctctacc

SEQ ID NO: 1896641 - DNA, 15 bp, Homo sapiens
ttttctgctctacca

SEQ ID NO: 1896642 - DNA, 15 bp, Homo sapiens
tttctgctctaccaa

SEQ ID NO: 1896643 - DNA, 15 bp, Homo sapiens
ttctgctctaccaag

SEQ ID NO: 1896644 - DNA, 15 bp, Homo sapiens
tctgctctaccaagg

SEQ ID NO: 1896645 - DNA, 15 bp, Homo sapiens
ctgctctaccaaggt

SEQ ID NO: 1896646 - DNA, 15 bp, Homo sapiens
tgctctaccaaggtg

SEQ ID NO: 1896647 - DNA, 15 bp, Homo sapiens
gctctaccaaggtgt

SEQ ID NO: 1896648 - DNA, 15 bp, Homo sapiens
ctctaccaaggtgtg

SEQ ID NO: 1896649 - DNA, 15 bp, Homo sapiens
tctaccaaggtgtgg

SEQ ID NO: 1896650 - DNA, 15 bp, Homo sapiens
ctaccaaggtgtggt

SEQ ID NO: 1896651 - DNA, 15 bp, Homo sapiens
taccaaggtgtggta

SEQ ID NO: 1896652 - DNA, 15 bp, Homo sapiens
accaaggtgtggtag

SEQ ID NO: 1896653 - DNA, 15 bp, Homo sapiens
ccaaggtgtggtagt

SEQ ID NO: 1896654 - DNA, 15 bp, Homo sapiens
caaggtgtggtagtt

SEQ ID NO: 1896655 - DNA, 15 bp, Homo sapiens
aaggtgtggtagttt

SEQ ID NO: 1896656 - DNA, 15 bp, Homo sapiens
aggtgtggtagtttg

SEQ ID NO: 1896657 - DNA, 15 bp, Homo sapiens
ggtgtggtagtttgg

SEQ ID NO: 1896658 - DNA, 15 bp, Homo sapiens
gtgtggtagtttggt

SEQ ID NO: 1896659 - DNA, 15 bp, Homo sapiens
tgtggtagtttggtc

SEQ ID NO: 1896660 - DNA, 15 bp, Homo sapiens
gtggtagtttggtca

SEQ ID NO: 1896661 - DNA, 15 bp, Homo sapiens
tggtagtttggtcag

SEQ ID NO: 1896662 - DNA, 15 bp, Homo sapiens
ggtagtttggtcagc

SEQ ID NO: 1896663 - DNA, 15 bp, Homo sapiens
gtagtttggtcagct

SEQ ID NO: 1896664 - DNA, 15 bp, Homo sapiens
tagtttggtcagctc

SEQ ID NO: 1896665 - DNA, 15 bp, Homo sapiens
agtttggtcagctcc

SEQ ID NO: 1896666 - DNA, 15 bp, Homo sapiens
gtttggtcagctccc

SEQ ID NO: 1896667 - DNA, 15 bp, Homo sapiens
tttggtcagctcccc

SEQ ID NO: 1896668 - DNA, 15 bp, Homo sapiens
ttggtcagctcccca

SEQ ID NO: 1896669 - DNA, 15 bp, Homo sapiens
tggtcagctccccat

SEQ ID NO: 1896670 - DNA, 15 bp, Homo sapiens
ggtcagctccccata

SEQ ID NO: 1896671 - DNA, 15 bp, Homo sapiens
gtcagctccccatag

SEQ ID NO: 1896672 - DNA, 15 bp, Homo sapiens
tcagctccccatagt

SEQ ID NO: 1896673 - DNA, 15 bp, Homo sapiens
cagctccccatagtt

SEQ ID NO: 1896674 - DNA, 15 bp, Homo sapiens
agctccccatagttt

SEQ ID NO: 1896675 - DNA, 15 bp, Homo sapiens
gctccccatagtttt

SEQ ID NO: 1896676 - DNA, 15 bp, Homo sapiens
ctccccatagttttc

SEQ ID NO: 1896677 - DNA, 15 bp, Homo sapiens
tccccatagttttca

SEQ ID NO: 1896678 - DNA, 15 bp, Homo sapiens
ccccatagttttcaa

SEQ ID NO: 1896679 - DNA, 15 bp, Homo sapiens
cccatagttttcaaa

SEQ ID NO: 1896680 - DNA, 15 bp, Homo sapiens
ccatagttttcaaat

SEQ ID NO: 1896681 - DNA, 15 bp, Homo sapiens
catagttttcaaatg

SEQ ID NO: 1896682 - DNA, 15 bp, Homo sapiens
atagttttcaaatgt

SEQ ID NO: 1896683 - DNA, 15 bp, Homo sapiens
tagttttcaaatgta

SEQ ID NO: 1896684 - DNA, 15 bp, Homo sapiens
agttttcaaatgtac

SEQ ID NO: 1896685 - DNA, 15 bp, Homo sapiens
gttttcaaatgtact

SEQ ID NO: 1896686 - DNA, 15 bp, Homo sapiens
ttttcaaatgtactt

SEQ ID NO: 1896687 - DNA, 15 bp, Homo sapiens
tttcaaatgtacttt

SEQ ID NO: 1896688 - DNA, 15 bp, Homo sapiens
ttcaaatgtacttta

SEQ ID NO: 1896689 - DNA, 15 bp, Homo sapiens
tcaaatgtactttag

SEQ ID NO: 1896690 - DNA, 15 bp, Homo sapiens
caaatgtactttaga

SEQ ID NO: 1896691 - DNA, 15 bp, Homo sapiens
aaatgtactttagat

SEQ ID NO: 1896692 - DNA, 15 bp, Homo sapiens
aatgtactttagata

SEQ ID NO: 1896693 - DNA, 15 bp, Homo sapiens
atgtactttagataa

SEQ ID NO: 1896694 - DNA, 15 bp, Homo sapiens
tgtactttagataag

SEQ ID NO: 1896695 - DNA, 15 bp, Homo sapiens
gtactttagataagt

SEQ ID NO: 1896696 - DNA, 15 bp, Homo sapiens
tactttagataagtt

SEQ ID NO: 1896697 - DNA, 15 bp, Homo sapiens
actttagataagttt

SEQ ID NO: 1896698 - DNA, 15 bp, Homo sapiens
ctttagataagtttg

SEQ ID NO: 1896699 - DNA, 15 bp, Homo sapiens
tttagataagtttgc

SEQ ID NO: 1896700 - DNA, 15 bp, Homo sapiens
ttagataagtttgca

SEQ ID NO: 1896701 - DNA, 15 bp, Homo sapiens
tagataagtttgcat

SEQ ID NO: 1896702 - DNA, 15 bp, Homo sapiens
agataagtttgcatt

SEQ ID NO: 1896703 - DNA, 15 bp, Homo sapiens
gataagtttgcattt

SEQ ID NO: 1896704 - DNA, 15 bp, Homo sapiens
ataagtttgcatttc

SEQ ID NO: 1896705 - DNA, 15 bp, Homo sapiens
taagtttgcatttca

SEQ ID NO: 1896706 - DNA, 15 bp, Homo sapiens
aagtttgcatttcaa

SEQ ID NO: 1896707 - DNA, 15 bp, Homo sapiens
agtttgcatttcaac

SEQ ID NO: 1896708 - DNA, 15 bp, Homo sapiens
gtttgcatttcaacc

SEQ ID NO: 1896709 - DNA, 15 bp, Homo sapiens
tttgcatttcaacct

SEQ ID NO: 1896710 - DNA, 15 bp, Homo sapiens
ttgcatttcaacctc

SEQ ID NO: 1896711 - DNA, 15 bp, Homo sapiens
tgcatttcaacctct

SEQ ID NO: 1896712 - DNA, 15 bp, Homo sapiens
gcatttcaacctcta

SEQ ID NO: 1896713 - DNA, 15 bp, Homo sapiens
catttcaacctctat

SEQ ID NO: 1896714 - DNA, 15 bp, Homo sapiens
atttcaacctctatc

SEQ ID NO: 1896715 - DNA, 15 bp, Homo sapiens
tttcaacctctatct

SEQ ID NO: 1896716 - DNA, 15 bp, Homo sapiens
ttcaacctctatctg

SEQ ID NO: 1896717 - DNA, 15 bp, Homo sapiens
tcaacctctatctgg

SEQ ID NO: 1896718 - DNA, 15 bp, Homo sapiens
caacctctatctgga

SEQ ID NO: 1896719 - DNA, 15 bp, Homo sapiens
aacctctatctggag

SEQ ID NO: 1896720 - DNA, 15 bp, Homo sapiens
acctctatctggaga

SEQ ID NO: 1896721 - DNA, 15 bp, Homo sapiens
cctctatctggagaa

SEQ ID NO: 1896722 - DNA, 15 bp, Homo sapiens
ctctatctggagaat

SEQ ID NO: 1896723 - DNA, 15 bp, Homo sapiens
tctatctggagaatc

SEQ ID NO: 1896724 - DNA, 15 bp, Homo sapiens
ctatctggagaatca

SEQ ID NO: 1896725 - DNA, 15 bp, Homo sapiens
tatctggagaatcac

SEQ ID NO: 1896726 - DNA, 15 bp, Homo sapiens
atctggagaatcaca

SEQ ID NO: 1896727 - DNA, 15 bp, Homo sapiens
tctggagaatcacat

SEQ ID NO: 1896728 - DNA, 15 bp, Homo sapiens
ctggagaatcacatt

SEQ ID NO: 1896729 - DNA, 15 bp, Homo sapiens
tggagaatcacattt

SEQ ID NO: 1896730 - DNA, 15 bp, Homo sapiens
ggagaatcacattta

SEQ ID NO: 1896731 - DNA, 15 bp, Homo sapiens
gagaatcacatttat

SEQ ID NO: 1896732 - DNA, 15 bp, Homo sapiens
agaatcacatttatc

SEQ ID NO: 1896733 - DNA, 15 bp, Homo sapiens
gaatcacatttatct

SEQ ID NO: 1896734 - DNA, 15 bp, Homo sapiens
aatcacatttatctt

SEQ ID NO: 1896735 - DNA, 15 bp, Homo sapiens
atcacatttatcttg

SEQ ID NO: 1896736 - DNA, 15 bp, Homo sapiens
tcacatttatcttgc

SEQ ID NO: 1896737 - DNA, 15 bp, Homo sapiens
cacatttatcttgcc

SEQ ID NO: 1896738 - DNA, 15 bp, Homo sapiens
acatttatcttgccc

SEQ ID NO: 1896739 - DNA, 15 bp, Homo sapiens
catttatcttgccct

SEQ ID NO: 1896740 - DNA, 15 bp, Homo sapiens
atttatcttgccctt

SEQ ID NO: 1896741 - DNA, 15 bp, Homo sapiens
tttatcttgcccttc

SEQ ID NO: 1896742 - DNA, 15 bp, Homo sapiens
ttatcttgcccttca

SEQ ID NO: 1896743 - DNA, 15 bp, Homo sapiens
tatcttgcccttcat

SEQ ID NO: 1896744 - DNA, 15 bp, Homo sapiens
atcttgcccttcatt

SEQ ID NO: 1896745 - DNA, 15 bp, Homo sapiens
tcttgcccttcatta

SEQ ID NO: 1896746 - DNA, 15 bp, Homo sapiens
cttgcccttcattaa

SEQ ID NO: 1896747 - DNA, 15 bp, Homo sapiens
ttgcccttcattaag

SEQ ID NO: 1896748 - DNA, 15 bp, Homo sapiens
tgcccttcattaagg

SEQ ID NO: 1896749 - DNA, 15 bp, Homo sapiens
gcccttcattaaggt

SEQ ID NO: 1896750 - DNA, 15 bp, Homo sapiens
cccttcattaaggtc

SEQ ID NO: 1896751 - DNA, 15 bp, Homo sapiens
ccttcattaaggtct

SEQ ID NO: 1896752 - DNA, 15 bp, Homo sapiens
cttcattaaggtcta

SEQ ID NO: 1896753 - DNA, 15 bp, Homo sapiens
ttcattaaggtctag

SEQ ID NO: 1896754 - DNA, 15 bp, Homo sapiens
tcattaaggtctagc

SEQ ID NO: 1896755 - DNA, 15 bp, Homo sapiens
cattaaggtctagca

SEQ ID NO: 1896756 - DNA, 15 bp, Homo sapiens
attaaggtctagcag

SEQ ID NO: 1896757 - DNA, 15 bp, Homo sapiens
ttaaggtctagcagt

SEQ ID NO: 1896758 - DNA, 15 bp, Homo sapiens
taaggtctagcagtt

SEQ ID NO: 1896759 - DNA, 15 bp, Homo sapiens
aaggtctagcagttt

SEQ ID NO: 1896760 - DNA, 15 bp, Homo sapiens
aggtctagcagtttc

SEQ ID NO: 1896761 - DNA, 15 bp, Homo sapiens
ggtctagcagtttcc

SEQ ID NO: 1896762 - DNA, 15 bp, Homo sapiens
gtctagcagtttcca

SEQ ID NO: 1896763 - DNA, 15 bp, Homo sapiens
tctagcagtttccaa

SEQ ID NO: 1896764 - DNA, 15 bp, Homo sapiens
ctagcagtttccaaa

SEQ ID NO: 1896765 - DNA, 15 bp, Homo sapiens
agcagtttccaaaat

SEQ ID NO: 1896766 - DNA, 15 bp, Homo sapiens
gcagtttccaaaatg

SEQ ID NO: 1896767 - DNA, 15 bp, Homo sapiens
cagtttccaaaatgt

SEQ ID NO: 1896768 - DNA, 15 bp, Homo sapiens
agtttccaaaatgtc

SEQ ID NO: 1896769 - DNA, 15 bp, Homo sapiens
gtttccaaaatgtct

SEQ ID NO: 1896770 - DNA, 15 bp, Homo sapiens
tttccaaaatgtctg

SEQ ID NO: 1896771 - DNA, 15 bp, Homo sapiens
ttccaaaatgtctgt

SEQ ID NO: 1896772 - DNA, 15 bp, Homo sapiens
tccaaaatgtctgta

SEQ ID NO: 1896773 - DNA, 15 bp, Homo sapiens
ccaaaatgtctgtag

SEQ ID NO: 1896774 - DNA, 15 bp, Homo sapiens
caaaatgtctgtaga

SEQ ID NO: 1896775 - DNA, 15 bp, Homo sapiens
aaaatgtctgtagag

SEQ ID NO: 1896776 - DNA, 15 bp, Homo sapiens
aaatgtctgtagaga

SEQ ID NO: 1896777 - DNA, 15 bp, Homo sapiens
aatgtctgtagagac

SEQ ID NO: 1896778 - DNA, 15 bp, Homo sapiens
atgtctgtagagact

SEQ ID NO: 1896779 - DNA, 15 bp, Homo sapiens
tgtctgtagagactg

SEQ ID NO: 1896780 - DNA, 15 bp, Homo sapiens
gtctgtagagactgt

SEQ ID NO: 1896781 - DNA, 15 bp, Homo sapiens
tctgtagagactgtg

SEQ ID NO: 1896782 - DNA, 15 bp, Homo sapiens
ctgtagagactgtgt

SEQ ID NO: 1896783 - DNA, 15 bp, Homo sapiens
tgtagagactgtgtg

SEQ ID NO: 1896784 - DNA, 15 bp, Homo sapiens
gtagagactgtgtgg

SEQ ID NO: 1896785 - DNA, 15 bp, Homo sapiens
tagagactgtgtggg

SEQ ID NO: 1896786 - DNA, 15 bp, Homo sapiens
agagactgtgtgggg

SEQ ID NO: 1896787 - DNA, 15 bp, Homo sapiens
gagactgtgtgggga

SEQ ID NO: 1896788 - DNA, 15 bp, Homo sapiens
agactgtgtggggaa

SEQ ID NO: 1896789 - DNA, 15 bp, Homo sapiens
gactgtgtggggaag

SEQ ID NO: 1896790 - DNA, 15 bp, Homo sapiens
actgtgtggggaagg

SEQ ID NO: 1896791 - DNA, 15 bp, Homo sapiens
ctgtgtggggaagga

SEQ ID NO: 1896792 - DNA, 15 bp, Homo sapiens
tgtgtggggaaggaa

SEQ ID NO: 1896793 - DNA, 15 bp, Homo sapiens
gtgtggggaaggaag

SEQ ID NO: 1896794 - DNA, 15 bp, Homo sapiens
tgtggggaaggaaga

SEQ ID NO: 1896795 - DNA, 15 bp, Homo sapiens
gtggggaaggaagat

SEQ ID NO: 1896796 - DNA, 15 bp, Homo sapiens
tggggaaggaagatg

SEQ ID NO: 1896797 - DNA, 15 bp, Homo sapiens
ggggaaggaagatgg

SEQ ID NO: 1896798 - DNA, 15 bp, Homo sapiens
gggaaggaagatgga

SEQ ID NO: 1896799 - DNA, 15 bp, Homo sapiens
ggaaggaagatggat

SEQ ID NO: 1896800 - DNA, 15 bp, Homo sapiens
gaaggaagatggatg

SEQ ID NO: 1896801 - DNA, 15 bp, Homo sapiens
aaggaagatggatgg

SEQ ID NO: 1896802 - DNA, 15 bp, Homo sapiens
aggaagatggatggc

SEQ ID NO: 1896803 - DNA, 15 bp, Homo sapiens
ggaagatggatggcc

SEQ ID NO: 1896804 - DNA, 15 bp, Homo sapiens
gaagatggatggcct

SEQ ID NO: 1896805 - DNA, 15 bp, Homo sapiens
aagatggatggcctg

SEQ ID NO: 1896806 - DNA, 15 bp, Homo sapiens
agatggatggcctga

SEQ ID NO: 1896807 - DNA, 15 bp, Homo sapiens
gatggatggcctgaa

SEQ ID NO: 1896808 - DNA, 15 bp, Homo sapiens
atggatggcctgaat

SEQ ID NO: 1896809 - DNA, 15 bp, Homo sapiens
tggatggcctgaatg

SEQ ID NO: 1896810 - DNA, 15 bp, Homo sapiens
ggatggcctgaatga

SEQ ID NO: 1896811 - DNA, 15 bp, Homo sapiens
gatggcctgaatgag

SEQ ID NO: 1896812 - DNA, 15 bp, Homo sapiens
atggcctgaatgaga

SEQ ID NO: 1896813 - DNA, 15 bp, Homo sapiens
tggcctgaatgagac

SEQ ID NO: 1896814 - DNA, 15 bp, Homo sapiens
ggcctgaatgagaca

SEQ ID NO: 1896815 - DNA, 15 bp, Homo sapiens
gcctgaatgagacaa

SEQ ID NO: 1896816 - DNA, 15 bp, Homo sapiens
cctgaatgagacaag

SEQ ID NO: 1896817 - DNA, 15 bp, Homo sapiens
ctgaatgagacaagc

SEQ ID NO: 1896818 - DNA, 15 bp, Homo sapiens
tgaatgagacaagcc

SEQ ID NO: 1896819 - DNA, 15 bp, Homo sapiens
gaatgagacaagccc

SEQ ID NO: 1896820 - DNA, 15 bp, Homo sapiens
aatgagacaagcccc

SEQ ID NO: 1896821 - DNA, 15 bp, Homo sapiens
atgagacaagcccct

SEQ ID NO: 1896822 - DNA, 15 bp, Homo sapiens
tgagacaagcccctt

SEQ ID NO: 1896823 - DNA, 15 bp, Homo sapiens
gagacaagccccttc

SEQ ID NO: 1896824 - DNA, 15 bp, Homo sapiens
agacaagccccttct

SEQ ID NO: 1896825 - DNA, 15 bp, Homo sapiens
gacaagccccttctc

SEQ ID NO: 1896826 - DNA, 15 bp, Homo sapiens
acaagccccttctcc

SEQ ID NO: 1896827 - DNA, 15 bp, Homo sapiens
caagccccttctccc

SEQ ID NO: 1896828 - DNA, 15 bp, Homo sapiens
aagccccttctcccg

SEQ ID NO: 1896829 - DNA, 15 bp, Homo sapiens
agccccttctcccgc

SEQ ID NO: 1896830 - DNA, 15 bp, Homo sapiens
gccccttctcccgcc

SEQ ID NO: 1896831 - DNA, 15 bp, Homo sapiens
ccccttctcccgccg

SEQ ID NO: 1896832 - DNA, 15 bp, Homo sapiens
cccttctcccgccgc

SEQ ID NO: 1896833 - DNA, 15 bp, Homo sapiens
ccttctcccgccgcc

SEQ ID NO: 1896834 - DNA, 15 bp, Homo sapiens
cttctcccgccgcct

SEQ ID NO: 1896835 - DNA, 15 bp, Homo sapiens
ttctcccgccgcctc

SEQ ID NO: 1896836 - DNA, 15 bp, Homo sapiens
tctcccgccgcctcc

SEQ ID NO: 1896837 - DNA, 15 bp, Homo sapiens
ctcccgccgcctcct

SEQ ID NO: 1896838 - DNA, 15 bp, Homo sapiens
tcccgccgcctcctc

SEQ ID NO: 1896839 - DNA, 15 bp, Homo sapiens
cccgccgcctcctcg

SEQ ID NO: 1896840 - DNA, 15 bp, Homo sapiens
ccgccgcctcctcga

SEQ ID NO: 1896841 - DNA, 15 bp, Homo sapiens
cgccgcctcctcgac

SEQ ID NO: 1896842 - DNA, 15 bp, Homo sapiens
gccgcctcctcgacc

SEQ ID NO: 1896843 - DNA, 15 bp, Homo sapiens
ccgcctcctcgacct

SEQ ID NO: 1896844 - DNA, 15 bp, Homo sapiens
cgcctcctcgacctg

SEQ ID NO: 1896845 - DNA, 15 bp, Homo sapiens
gcctcctcgacctgc

SEQ ID NO: 1896846 - DNA, 15 bp, Homo sapiens
cctcctcgacctgcc

SEQ ID NO: 1896847 - DNA, 15 bp, Homo sapiens
ctcctcgacctgccc

SEQ ID NO: 1896848 - DNA, 15 bp, Homo sapiens
tcctcgacctgcccc

SEQ ID NO: 1896849 - DNA, 15 bp, Homo sapiens
cctcgacctgccccc

SEQ ID NO: 1896850 - DNA, 15 bp, Homo sapiens
ctcgacctgccccca

SEQ ID NO: 1896851 - DNA, 15 bp, Homo sapiens
tcgacctgcccccag

SEQ ID NO: 1896852 - DNA, 15 bp, Homo sapiens
cgacctgcccccaga

SEQ ID NO: 1896853 - DNA, 15 bp, Homo sapiens
gacctgcccccagag

SEQ ID NO: 1896854 - DNA, 15 bp, Homo sapiens
acctgcccccagagt

SEQ ID NO: 1896855 - DNA, 15 bp, Homo sapiens
cctgcccccagagtc

SEQ ID NO: 1896856 - DNA, 15 bp, Homo sapiens
ctgcccccagagtct

SEQ ID NO: 1896857 - DNA, 15 bp, Homo sapiens
tgcccccagagtctt

SEQ ID NO: 1896858 - DNA, 15 bp, Homo sapiens
gcccccagagtcttc

SEQ ID NO: 1896859 - DNA, 15 bp, Homo sapiens
cccccagagtcttct

SEQ ID NO: 1896860 - DNA, 15 bp, Homo sapiens
ccccagagtcttctc

SEQ ID NO: 1896861 - DNA, 15 bp, Homo sapiens
cccagagtcttctct

SEQ ID NO: 1896862 - DNA, 15 bp, Homo sapiens
ccagagtcttctctg

SEQ ID NO: 1896863 - DNA, 15 bp, Homo sapiens
cagagtcttctctgc

SEQ ID NO: 1896864 - DNA, 15 bp, Homo sapiens
agagtcttctctgca

SEQ ID NO: 1896865 - DNA, 15 bp, Homo sapiens
gagtcttctctgcat

SEQ ID NO: 1896866 - DNA, 15 bp, Homo sapiens
agtcttctctgcatc

SEQ ID NO: 1896867 - DNA, 15 bp, Homo sapiens
gtcttctctgcatct

SEQ ID NO: 1896868 - DNA, 15 bp, Homo sapiens
tcttctctgcatctt

SEQ ID NO: 1896869 - DNA, 15 bp, Homo sapiens
cttctctgcatcttc

SEQ ID NO: 1896870 - DNA, 15 bp, Homo sapiens
ttctctgcatcttca

SEQ ID NO: 1896871 - DNA, 15 bp, Homo sapiens
tctctgcatcttcac

SEQ ID NO: 1896872 - DNA, 15 bp, Homo sapiens
ctctgcatcttcacc

SEQ ID NO: 1896873 - DNA, 15 bp, Homo sapiens
tctgcatcttcaccc

SEQ ID NO: 1896874 - DNA, 15 bp, Homo sapiens
ctgcatcttcaccct

SEQ ID NO: 1896875 - DNA, 15 bp, Homo sapiens
tgcatcttcaccctg

SEQ ID NO: 1896876 - DNA, 15 bp, Homo sapiens
gcatcttcaccctgg

SEQ ID NO: 1896877 - DNA, 15 bp, Homo sapiens
catcttcaccctggt

SEQ ID NO: 1896878 - DNA, 15 bp, Homo sapiens
atcttcaccctggtc

SEQ ID NO: 1896879 - DNA, 15 bp, Homo sapiens
tcttcaccctggtca

SEQ ID NO: 1896880 - DNA, 15 bp, Homo sapiens
cttcaccctggtcac

SEQ ID NO: 1896881 - DNA, 15 bp, Homo sapiens
ttcaccctggtcact

SEQ ID NO: 1896882 - DNA, 15 bp, Homo sapiens
tcaccctggtcactt

SEQ ID NO: 1896883 - DNA, 15 bp, Homo sapiens
caccctggtcacttc

SEQ ID NO: 1896884 - DNA, 15 bp, Homo sapiens
accctggtcacttca

SEQ ID NO: 1896885 - DNA, 15 bp, Homo sapiens
ccctggtcacttcat

SEQ ID NO: 1896886 - DNA, 15 bp, Homo sapiens
cctggtcacttcatc

SEQ ID NO: 1896887 - DNA, 15 bp, Homo sapiens
ctggtcacttcatca

SEQ ID NO: 1896888 - DNA, 15 bp, Homo sapiens
tggtcacttcatcag

SEQ ID NO: 1896889 - DNA, 15 bp, Homo sapiens
ggtcacttcatcagg

SEQ ID NO: 1896890 - DNA, 15 bp, Homo sapiens
gtcacttcatcaggc

SEQ ID NO: 1896891 - DNA, 15 bp, Homo sapiens
tcacttcatcaggcc

SEQ ID NO: 1896892 - DNA, 15 bp, Homo sapiens
cacttcatcaggccc

SEQ ID NO: 1896893 - DNA, 15 bp, Homo sapiens
acttcatcaggcccc

SEQ ID NO: 1896894 - DNA, 15 bp, Homo sapiens
cttcatcaggcccct

SEQ ID NO: 1896895 - DNA, 15 bp, Homo sapiens
ttcatcaggcccctc

SEQ ID NO: 1896896 - DNA, 15 bp, Homo sapiens
tcatcaggcccctcc

SEQ ID NO: 1896897 - DNA, 15 bp, Homo sapiens
catcaggcccctccc

SEQ ID NO: 1896898 - DNA, 15 bp, Homo sapiens
atcaggcccctcccg

SEQ ID NO: 1896899 - DNA, 15 bp, Homo sapiens
tcaggcccctcccga

SEQ ID NO: 1896900 - DNA, 15 bp, Homo sapiens
caggcccctcccgaa

SEQ ID NO: 1896901 - DNA, 15 bp, Homo sapiens
aggcccctcccgaag

SEQ ID NO: 1896902 - DNA, 15 bp, Homo sapiens
ggcccctcccgaagc

SEQ ID NO: 1896903 - DNA, 15 bp, Homo sapiens
gcccctcccgaagct

SEQ ID NO: 1896904 - DNA, 15 bp, Homo sapiens
cccctcccgaagctc

SEQ ID NO: 1896905 - DNA, 15 bp, Homo sapiens
ccctcccgaagctcc

SEQ ID NO: 1896906 - DNA, 15 bp, Homo sapiens
cctcccgaagctccc

SEQ ID NO: 1896907 - DNA, 15 bp, Homo sapiens
ctcccgaagctccca

SEQ ID NO: 1896908 - DNA, 15 bp, Homo sapiens
tcccgaagctcccac

SEQ ID NO: 1896909 - DNA, 15 bp, Homo sapiens
cccgaagctcccacg

SEQ ID NO: 1896910 - DNA, 15 bp, Homo sapiens
ccgaagctcccacgc

SEQ ID NO: 1896911 - DNA, 15 bp, Homo sapiens
cgaagctcccacgcc

SEQ ID NO: 1896912 - DNA, 15 bp, Homo sapiens
gaagctcccacgcca

SEQ ID NO: 1896913 - DNA, 15 bp, Homo sapiens
aagctcccacgccac

SEQ ID NO: 1896914 - DNA, 15 bp, Homo sapiens
agctcccacgccaca

SEQ ID NO: 1896915 - DNA, 15 bp, Homo sapiens
gctcccacgccacac

SEQ ID NO: 1896916 - DNA, 15 bp, Homo sapiens
ctcccacgccacacc

SEQ ID NO: 1896917 - DNA, 15 bp, Homo sapiens
tcccacgccacaccc

SEQ ID NO: 1896918 - DNA, 15 bp, Homo sapiens
cccacgccacacccc

SEQ ID NO: 1896919 - DNA, 15 bp, Homo sapiens
ccacgccacacccca

SEQ ID NO: 1896920 - DNA, 15 bp, Homo sapiens
cacgccacaccccac

SEQ ID NO: 1896921 - DNA, 15 bp, Homo sapiens
acgccacaccccaca

SEQ ID NO: 1896922 - DNA, 15 bp, Homo sapiens
cgccacaccccacac

SEQ ID NO: 1896923 - DNA, 15 bp, Homo sapiens
gccacaccccacacc

SEQ ID NO: 1896924 - DNA, 15 bp, Homo sapiens
ccacaccccacaccc

SEQ ID NO: 1896925 - DNA, 15 bp, Homo sapiens
cacaccccacacccc

SEQ ID NO: 1896926 - DNA, 15 bp, Homo sapiens
acaccccacaccccg

SEQ ID NO: 1896927 - DNA, 15 bp, Homo sapiens
caccccacaccccgc

SEQ ID NO: 1896928 - DNA, 15 bp, Homo sapiens
accccacaccccgca

SEQ ID NO: 1896929 - DNA, 15 bp, Homo sapiens
ccccacaccccgcag

SEQ ID NO: 1896930 - DNA, 15 bp, Homo sapiens
cccacaccccgcagg

SEQ ID NO: 1896931 - DNA, 15 bp, Homo sapiens
ccacaccccgcaggt

SEQ ID NO: 1896932 - DNA, 15 bp, Homo sapiens
cacaccccgcaggtt

SEQ ID NO: 1896933 - DNA, 15 bp, Homo sapiens
acaccccgcaggtta

SEQ ID NO: 1896934 - DNA, 15 bp, Homo sapiens
caccccgcaggttat

SEQ ID NO: 1896935 - DNA, 15 bp, Homo sapiens
accccgcaggttatc

SEQ ID NO: 1896936 - DNA, 15 bp, Homo sapiens
ccccgcaggttatcg

SEQ ID NO: 1896937 - DNA, 15 bp, Homo sapiens
cccgcaggttatcgc

SEQ ID NO: 1896938 - DNA, 15 bp, Homo sapiens
ccgcaggttatcgca

SEQ ID NO: 1896939 - DNA, 15 bp, Homo sapiens
cgcaggttatcgcaa

SEQ ID NO: 1896940 - DNA, 15 bp, Homo sapiens
gcaggttatcgcaac

SEQ ID NO: 1896941 - DNA, 15 bp, Homo sapiens
caggttatcgcaact

SEQ ID NO: 1896942 - DNA, 15 bp, Homo sapiens
aggttatcgcaactg

SEQ ID NO: 1896943 - DNA, 15 bp, Homo sapiens
ggttatcgcaactgc

SEQ ID NO: 1896944 - DNA, 15 bp, Homo sapiens
gttatcgcaactgcc

SEQ ID NO: 1896945 - DNA, 15 bp, Homo sapiens
ttatcgcaactgccc

SEQ ID NO: 1896946 - DNA, 15 bp, Homo sapiens
tatcgcaactgccct

SEQ ID NO: 1896947 - DNA, 15 bp, Homo sapiens
atcgcaactgcccta

SEQ ID NO: 1896948 - DNA, 15 bp, Homo sapiens
tcgcaactgccctag

SEQ ID NO: 1896949 - DNA, 15 bp, Homo sapiens
cgcaactgccctaga

SEQ ID NO: 1896950 - DNA, 15 bp, Homo sapiens
gcaactgccctagag

SEQ ID NO: 1896951 - DNA, 15 bp, Homo sapiens
caactgccctagagg

SEQ ID NO: 1896952 - DNA, 15 bp, Homo sapiens
aactgccctagaggc

SEQ ID NO: 1896953 - DNA, 15 bp, Homo sapiens
actgccctagaggct

SEQ ID NO: 1896954 - DNA, 15 bp, Homo sapiens
ctgccctagaggctg

SEQ ID NO: 1896955 - DNA, 15 bp, Homo sapiens
tgccctagaggctgc

SEQ ID NO: 1896956 - DNA, 15 bp, Homo sapiens
gccctagaggctgcc

SEQ ID NO: 1896957 - DNA, 15 bp, Homo sapiens
ccctagaggctgcct

SEQ ID NO: 1896958 - DNA, 15 bp, Homo sapiens
cctagaggctgcctg

SEQ ID NO: 1896959 - DNA, 15 bp, Homo sapiens
ctagaggctgcctgc

SEQ ID NO: 1896960 - DNA, 15 bp, Homo sapiens
tagaggctgcctgcg

SEQ ID NO: 1896961 - DNA, 15 bp, Homo sapiens
agaggctgcctgcga

SEQ ID NO: 1896962 - DNA, 15 bp, Homo sapiens
gaggctgcctgcgac

SEQ ID NO: 1896963 - DNA, 15 bp, Homo sapiens
aggctgcctgcgacc

SEQ ID NO: 1896964 - DNA, 15 bp, Homo sapiens
ggctgcctgcgacca

SEQ ID NO: 1896965 - DNA, 15 bp, Homo sapiens
gctgcctgcgaccat

SEQ ID NO: 1896966 - DNA, 15 bp, Homo sapiens
ctgcctgcgaccatt

SEQ ID NO: 1896967 - DNA, 15 bp, Homo sapiens
tgcctgcgaccattt

SEQ ID NO: 1896968 - DNA, 15 bp, Homo sapiens
gcctgcgaccatttg

SEQ ID NO: 1896969 - DNA, 15 bp, Homo sapiens
cctgcgaccatttgc

SEQ ID NO: 1896970 - DNA, 15 bp, Homo sapiens
ctgcgaccatttgca

SEQ ID NO: 1896971 - DNA, 15 bp, Homo sapiens
tgcgaccatttgcag

SEQ ID NO: 1896972 - DNA, 15 bp, Homo sapiens
gcgaccatttgcagc

SEQ ID NO: 1896973 - DNA, 15 bp, Homo sapiens
cgaccatttgcagct

SEQ ID NO: 1896974 - DNA, 15 bp, Homo sapiens
gaccatttgcagctt

SEQ ID NO: 1896975 - DNA, 15 bp, Homo sapiens
accatttgcagcttg

SEQ ID NO: 1896976 - DNA, 15 bp, Homo sapiens
ccatttgcagcttgt

SEQ ID NO: 1896977 - DNA, 15 bp, Homo sapiens
catttgcagcttgtg

SEQ ID NO: 1896978 - DNA, 15 bp, Homo sapiens
atttgcagcttgtga

SEQ ID NO: 1896979 - DNA, 15 bp, Homo sapiens
tttgcagcttgtgaa

SEQ ID NO: 1896980 - DNA, 15 bp, Homo sapiens
ttgcagcttgtgaaa

SEQ ID NO: 1896981 - DNA, 15 bp, Homo sapiens
tgcagcttgtgaaag

SEQ ID NO: 1896982 - DNA, 15 bp, Homo sapiens
gcagcttgtgaaagt

SEQ ID NO: 1896983 - DNA, 15 bp, Homo sapiens
cagcttgtgaaagtg

SEQ ID NO: 1896984 - DNA, 15 bp, Homo sapiens
agcttgtgaaagtga

SEQ ID NO: 1896985 - DNA, 15 bp, Homo sapiens
gcttgtgaaagtgat

SEQ ID NO: 1896986 - DNA, 15 bp, Homo sapiens
cttgtgaaagtgatt

SEQ ID NO: 1896987 - DNA, 15 bp, Homo sapiens
ttgtgaaagtgattt

SEQ ID NO: 1896988 - DNA, 15 bp, Homo sapiens
tgtgaaagtgatttt

SEQ ID NO: 1896989 - DNA, 15 bp, Homo sapiens
gtgaaagtgattttc

SEQ ID NO: 1896990 - DNA, 15 bp, Homo sapiens
tgaaagtgattttct

SEQ ID NO: 1896991 - DNA, 15 bp, Homo sapiens
gaaagtgattttctc

SEQ ID NO: 1896992 - DNA, 15 bp, Homo sapiens
aaagtgattttctca

SEQ ID NO: 1896993 - DNA, 15 bp, Homo sapiens
aagtgattttctcag

SEQ ID NO: 1896994 - DNA, 15 bp, Homo sapiens
agtgattttctcagc

SEQ ID NO: 1896995 - DNA, 15 bp, Homo sapiens
gtgattttctcagcc

SEQ ID NO: 1896996 - DNA, 15 bp, Homo sapiens
tgattttctcagccc

SEQ ID NO: 1896997 - DNA, 15 bp, Homo sapiens
gattttctcagccct

SEQ ID NO: 1896998 - DNA, 15 bp, Homo sapiens
attttctcagccctt

SEQ ID NO: 1896999 - DNA, 15 bp, Homo sapiens
ttttctcagcccttt

SEQ ID NO: 1897000 - DNA, 15 bp, Homo sapiens
tttctcagccctttg

SEQ ID NO: 1897001 - DNA, 15 bp, Homo sapiens
ttctcagccctttgc

SEQ ID NO: 1897002 - DNA, 15 bp, Homo sapiens
tctcagccctttgct

SEQ ID NO: 1897003 - DNA, 15 bp, Homo sapiens
ctcagccctttgctg

SEQ ID NO: 1897004 - DNA, 15 bp, Homo sapiens
tcagccctttgctga

SEQ ID NO: 1897005 - DNA, 15 bp, Homo sapiens
cagccctttgctgag

SEQ ID NO: 1897006 - DNA, 15 bp, Homo sapiens
agccctttgctgaga

SEQ ID NO: 1897007 - DNA, 15 bp, Homo sapiens
gccctttgctgagat

SEQ ID NO: 1897008 - DNA, 15 bp, Homo sapiens
ccctttgctgagata

SEQ ID NO: 1897009 - DNA, 15 bp, Homo sapiens
cctttgctgagataa

SEQ ID NO: 1897010 - DNA, 15 bp, Homo sapiens
ctttgctgagataat

SEQ ID NO: 1897011 - DNA, 15 bp, Homo sapiens
tttgctgagataatg

SEQ ID NO: 1897012 - DNA, 15 bp, Homo sapiens
ttgctgagataatgt

SEQ ID NO: 1897013 - DNA, 15 bp, Homo sapiens
tgctgagataatgtc

SEQ ID NO: 1897014 - DNA, 15 bp, Homo sapiens
gctgagataatgtcc

SEQ ID NO: 1897015 - DNA, 15 bp, Homo sapiens
ctgagataatgtccc

SEQ ID NO: 1897016 - DNA, 15 bp, Homo sapiens
tgagataatgtccct

SEQ ID NO: 1897017 - DNA, 15 bp, Homo sapiens
gagataatgtccctg

SEQ ID NO: 1897018 - DNA, 15 bp, Homo sapiens
agataatgtccctgg

SEQ ID NO: 1897019 - DNA, 15 bp, Homo sapiens
gataatgtccctggg

SEQ ID NO: 1897020 - DNA, 15 bp, Homo sapiens
ataatgtccctggga

SEQ ID NO: 1897021 - DNA, 15 bp, Homo sapiens
taatgtccctgggac

SEQ ID NO: 1897022 - DNA, 15 bp, Homo sapiens
aatgtccctgggaca

SEQ ID NO: 1897023 - DNA, 15 bp, Homo sapiens
atgtccctgggacaa

SEQ ID NO: 1897024 - DNA, 15 bp, Homo sapiens
tgtccctgggacaat

SEQ ID NO: 1897025 - DNA, 15 bp, Homo sapiens
gtccctgggacaatg

SEQ ID NO: 1897026 - DNA, 15 bp, Homo sapiens
tccctgggacaatga

SEQ ID NO: 1897027 - DNA, 15 bp, Homo sapiens
ccctgggacaatgac

SEQ ID NO: 1897028 - DNA, 15 bp, Homo sapiens
cctgggacaatgacc

SEQ ID NO: 1897029 - DNA, 15 bp, Homo sapiens
ctgggacaatgacct

SEQ ID NO: 1897030 - DNA, 15 bp, Homo sapiens
tgggacaatgacctt

SEQ ID NO: 1897031 - DNA, 15 bp, Homo sapiens
gggacaatgaccttt

SEQ ID NO: 1897032 - DNA, 15 bp, Homo sapiens
ggacaatgaccttta

SEQ ID NO: 1897033 - DNA, 15 bp, Homo sapiens
gacaatgacctttag

SEQ ID NO: 1897034 - DNA, 15 bp, Homo sapiens
acaatgacctttagt

SEQ ID NO: 1897035 - DNA, 15 bp, Homo sapiens
caatgacctttagta

SEQ ID NO: 1897036 - DNA, 15 bp, Homo sapiens
aatgacctttagtag

SEQ ID NO: 1897037 - DNA, 15 bp, Homo sapiens
atgacctttagtaga

SEQ ID NO: 1897038 - DNA, 15 bp, Homo sapiens
tgacctttagtagat

SEQ ID NO: 1897039 - DNA, 15 bp, Homo sapiens
gacctttagtagatg

SEQ ID NO: 1897040 - DNA, 15 bp, Homo sapiens
acctttagtagatgc

SEQ ID NO: 1897041 - DNA, 15 bp, Homo sapiens
cctttagtagatgca

SEQ ID NO: 1897042 - DNA, 15 bp, Homo sapiens
ctttagtagatgcag

SEQ ID NO: 1897043 - DNA, 15 bp, Homo sapiens
tttagtagatgcaga

SEQ ID NO: 1897044 - DNA, 15 bp, Homo sapiens
ttagtagatgcagag

SEQ ID NO: 1897045 - DNA, 15 bp, Homo sapiens
tagtagatgcagaga

SEQ ID NO: 1897046 - DNA, 15 bp, Homo sapiens
agtagatgcagagag

SEQ ID NO: 1897047 - DNA, 15 bp, Homo sapiens
gtagatgcagagaga

SEQ ID NO: 1897048 - DNA, 15 bp, Homo sapiens
tagatgcagagagat

SEQ ID NO: 1897049 - DNA, 15 bp, Homo sapiens
agatgcagagagatt

SEQ ID NO: 1897050 - DNA, 15 bp, Homo sapiens
gatgcagagagattg

SEQ ID NO: 1897051 - DNA, 15 bp, Homo sapiens
atgcagagagattgc

SEQ ID NO: 1897052 - DNA, 15 bp, Homo sapiens
tgcagagagattgca

SEQ ID NO: 1897053 - DNA, 15 bp, Homo sapiens
gcagagagattgcac

SEQ ID NO: 1897054 - DNA, 15 bp, Homo sapiens
cagagagattgcact

SEQ ID NO: 1897055 - DNA, 15 bp, Homo sapiens
agagagattgcactg

SEQ ID NO: 1897056 - DNA, 15 bp, Homo sapiens
gagagattgcactgc

SEQ ID NO: 1897057 - DNA, 15 bp, Homo sapiens
agagattgcactgcc

SEQ ID NO: 1897058 - DNA, 15 bp, Homo sapiens
gagattgcactgcca

SEQ ID NO: 1897059 - DNA, 15 bp, Homo sapiens
agattgcactgccac

SEQ ID NO: 1897060 - DNA, 15 bp, Homo sapiens
gattgcactgccacc

SEQ ID NO: 1897061 - DNA, 15 bp, Homo sapiens
attgcactgccaccc

SEQ ID NO: 1897062 - DNA, 15 bp, Homo sapiens
ttgcactgccacccc

SEQ ID NO: 1897063 - DNA, 15 bp, Homo sapiens
tgcactgccaccccc

SEQ ID NO: 1897064 - DNA, 15 bp, Homo sapiens
gcactgccaccccca

SEQ ID NO: 1897065 - DNA, 15 bp, Homo sapiens
cactgccacccccag

SEQ ID NO: 1897066 - DNA, 15 bp, Homo sapiens
actgccacccccagc

SEQ ID NO: 1897067 - DNA, 15 bp, Homo sapiens
ctgccacccccagct

SEQ ID NO: 1897068 - DNA, 15 bp, Homo sapiens
tgccacccccagctg

SEQ ID NO: 1897069 - DNA, 15 bp, Homo sapiens
gccacccccagctgc

SEQ ID NO: 1897070 - DNA, 15 bp, Homo sapiens
ccacccccagctgct

SEQ ID NO: 1897071 - DNA, 15 bp, Homo sapiens
cacccccagctgctg

SEQ ID NO: 1897072 - DNA, 15 bp, Homo sapiens
acccccagctgctgg

SEQ ID NO: 1897073 - DNA, 15 bp, Homo sapiens
cccccagctgctggc

SEQ ID NO: 1897074 - DNA, 15 bp, Homo sapiens
ccccagctgctggct

SEQ ID NO: 1897075 - DNA, 15 bp, Homo sapiens
cccagctgctggctt

SEQ ID NO: 1897076 - DNA, 15 bp, Homo sapiens
ccagctgctggcttg

SEQ ID NO: 1897077 - DNA, 15 bp, Homo sapiens
cagctgctggcttgg

SEQ ID NO: 1897078 - DNA, 15 bp, Homo sapiens
agctgctggcttggg

SEQ ID NO: 1897079 - DNA, 15 bp, Homo sapiens
gctgctggcttggga

SEQ ID NO: 1897080 - DNA, 15 bp, Homo sapiens
ctgctggcttgggaa

SEQ ID NO: 1897081 - DNA, 15 bp, Homo sapiens
tgctggcttgggaac

SEQ ID NO: 1897082 - DNA, 15 bp, Homo sapiens
gctggcttgggaact

SEQ ID NO: 1897083 - DNA, 15 bp, Homo sapiens
ctggcttgggaactc

SEQ ID NO: 1897084 - DNA, 15 bp, Homo sapiens
tggcttgggaactct

SEQ ID NO: 1897085 - DNA, 15 bp, Homo sapiens
ggcttgggaactctc

SEQ ID NO: 1897086 - DNA, 15 bp, Homo sapiens
gcttgggaactctcc

SEQ ID NO: 1897087 - DNA, 15 bp, Homo sapiens
cttgggaactctcca

SEQ ID NO: 1897088 - DNA, 15 bp, Homo sapiens
ttgggaactctccag

SEQ ID NO: 1897089 - DNA, 15 bp, Homo sapiens
tgggaactctccagc

SEQ ID NO: 1897090 - DNA, 15 bp, Homo sapiens
gggaactctccagca

SEQ ID NO: 1897091 - DNA, 15 bp, Homo sapiens
ggaactctccagcat

SEQ ID NO: 1897092 - DNA, 15 bp, Homo sapiens
gaactctccagcatg

SEQ ID NO: 1897093 - DNA, 15 bp, Homo sapiens
aactctccagcatgt

SEQ ID NO: 1897094 - DNA, 15 bp, Homo sapiens
actctccagcatgtt

SEQ ID NO: 1897095 - DNA, 15 bp, Homo sapiens
ctctccagcatgttt

SEQ ID NO: 1897096 - DNA, 15 bp, Homo sapiens
tctccagcatgttta

SEQ ID NO: 1897097 - DNA, 15 bp, Homo sapiens
ctccagcatgtttac

SEQ ID NO: 1897098 - DNA, 15 bp, Homo sapiens
tccagcatgtttact

SEQ ID NO: 1897099 - DNA, 15 bp, Homo sapiens
tcctccgcttgccct

SEQ ID NO: 1897100 - DNA, 15 bp, Homo sapiens
cctccgcttgccctg

SEQ ID NO: 1897101 - DNA, 15 bp, Homo sapiens
ctccgcttgccctgt

SEQ ID NO: 1897102 - DNA, 15 bp, Homo sapiens
tccgcttgccctgtt

SEQ ID NO: 1897103 - DNA, 15 bp, Homo sapiens
ccgcttgccctgttc

SEQ ID NO: 1897104 - DNA, 15 bp, Homo sapiens
cgcttgccctgttcc

SEQ ID NO: 1897105 - DNA, 15 bp, Homo sapiens
gcttgccctgttccc

SEQ ID NO: 1897106 - DNA, 15 bp, Homo sapiens
cttgccctgttcccg

SEQ ID NO: 1897107 - DNA, 15 bp, Homo sapiens
ttgccctgttcccgc

SEQ ID NO: 1897108 - DNA, 15 bp, Homo sapiens
tgccctgttcccgct

SEQ ID NO: 1897109 - DNA, 15 bp, Homo sapiens
gccctgttcccgctc

SEQ ID NO: 1897110 - DNA, 15 bp, Homo sapiens
ccctgttcccgctcc

SEQ ID NO: 1897111 - DNA, 15 bp, Homo sapiens
cctgttcccgctcct

SEQ ID NO: 1897112 - DNA, 15 bp, Homo sapiens
ctgttcccgctcctt

SEQ ID NO: 1897113 - DNA, 15 bp, Homo sapiens
tgttcccgctccttc

SEQ ID NO: 1897114 - DNA, 15 bp, Homo sapiens
gttcccgctccttca

SEQ ID NO: 1897115 - DNA, 15 bp, Homo sapiens
ttcccgctccttcag

SEQ ID NO: 1897116 - DNA, 15 bp, Homo sapiens
tcccgctccttcagg

SEQ ID NO: 1897117 - DNA, 15 bp, Homo sapiens
cccgctccttcagga

SEQ ID NO: 1897118 - DNA, 15 bp, Homo sapiens
ccgctccttcaggag

SEQ ID NO: 1897119 - DNA, 15 bp, Homo sapiens
cgctccttcaggaga

SEQ ID NO: 1897120 - DNA, 15 bp, Homo sapiens
gctccttcaggagac

SEQ ID NO: 1897121 - DNA, 15 bp, Homo sapiens
ctccttcaggagaca

SEQ ID NO: 1897122 - DNA, 15 bp, Homo sapiens
tccttcaggagacag

SEQ ID NO: 1897123 - DNA, 15 bp, Homo sapiens
ccttcaggagacagc

SEQ ID NO: 1897124 - DNA, 15 bp, Homo sapiens
cttcaggagacagct

SEQ ID NO: 1897125 - DNA, 15 bp, Homo sapiens
ttcaggagacagctg

SEQ ID NO: 1897126 - DNA, 15 bp, Homo sapiens
tcaggagacagctgt

SEQ ID NO: 1897127 - DNA, 15 bp, Homo sapiens
caggagacagctgtg

SEQ ID NO: 1897128 - DNA, 15 bp, Homo sapiens
aggagacagctgtgc

SEQ ID NO: 1897129 - DNA, 15 bp, Homo sapiens
ggagacagctgtgcc

SEQ ID NO: 1897130 - DNA, 15 bp, Homo sapiens
gagacagctgtgccc

SEQ ID NO: 1897131 - DNA, 15 bp, Homo sapiens
agacagctgtgccct

SEQ ID NO: 1897132 - DNA, 15 bp, Homo sapiens
gacagctgtgccctt

SEQ ID NO: 1897133 - DNA, 15 bp, Homo sapiens
acagctgtgcccttt

SEQ ID NO: 1897134 - DNA, 15 bp, Homo sapiens
cagctgtgccctttt

SEQ ID NO: 1897135 - DNA, 15 bp, Homo sapiens
agctgtgcccttttg

SEQ ID NO: 1897136 - DNA, 15 bp, Homo sapiens
gctgtgcccttttgg

SEQ ID NO: 1897137 - DNA, 15 bp, Homo sapiens
ctgtgcccttttgga

SEQ ID NO: 1897138 - DNA, 15 bp, Homo sapiens
tgtgcccttttggag

SEQ ID NO: 1897139 - DNA, 15 bp, Homo sapiens
gtgcccttttggagg

SEQ ID NO: 1897140 - DNA, 15 bp, Homo sapiens
tgcccttttggaggc

SEQ ID NO: 1897141 - DNA, 15 bp, Homo sapiens
gcccttttggaggca

SEQ ID NO: 1897142 - DNA, 15 bp, Homo sapiens
cccttttggaggcag

SEQ ID NO: 1897143 - DNA, 15 bp, Homo sapiens
ccttttggaggcagg

SEQ ID NO: 1897144 - DNA, 15 bp, Homo sapiens
cttttggaggcagga

SEQ ID NO: 1897145 - DNA, 15 bp, Homo sapiens
ttttggaggcaggaa

SEQ ID NO: 1897146 - DNA, 15 bp, Homo sapiens
tttggaggcaggaat

SEQ ID NO: 1897147 - DNA, 15 bp, Homo sapiens
ttggaggcaggaata

SEQ ID NO: 1897148 - DNA, 15 bp, Homo sapiens
tggaggcaggaatag

SEQ ID NO: 1897149 - DNA, 15 bp, Homo sapiens
ggaggcaggaatagg

SEQ ID NO: 1897150 - DNA, 15 bp, Homo sapiens
gaggcaggaataggt

SEQ ID NO: 1897151 - DNA, 15 bp, Homo sapiens
aggcaggaataggtg

SEQ ID NO: 1897152 - DNA, 15 bp, Homo sapiens
ggcaggaataggtgt

SEQ ID NO: 1897153 - DNA, 15 bp, Homo sapiens
gcaggaataggtgtg

SEQ ID NO: 1897154 - DNA, 15 bp, Homo sapiens
caggaataggtgtgt

SEQ ID NO: 1897155 - DNA, 15 bp, Homo sapiens
aggaataggtgtgtc

SEQ ID NO: 1897156 - DNA, 15 bp, Homo sapiens
ggaataggtgtgtct

SEQ ID NO: 1897157 - DNA, 15 bp, Homo sapiens
gaataggtgtgtctg

SEQ ID NO: 1897158 - DNA, 15 bp, Homo sapiens
aataggtgtgtctgt

SEQ ID NO: 1897159 - DNA, 15 bp, Homo sapiens
ataggtgtgtctgtc

SEQ ID NO: 1897160 - DNA, 15 bp, Homo sapiens
taggtgtgtctgtcg

SEQ ID NO: 1897161 - DNA, 15 bp, Homo sapiens
aggtgtgtctgtcgc

SEQ ID NO: 1897162 - DNA, 15 bp, Homo sapiens
ggtgtgtctgtcgcc

SEQ ID NO: 1897163 - DNA, 15 bp, Homo sapiens
gtgtgtctgtcgcct

SEQ ID NO: 1897164 - DNA, 15 bp, Homo sapiens
tgtgtctgtcgcctg

SEQ ID NO: 1897165 - DNA, 15 bp, Homo sapiens
gtgtctgtcgcctgc

SEQ ID NO: 1897166 - DNA, 15 bp, Homo sapiens
tgtctgtcgcctgca

SEQ ID NO: 1897167 - DNA, 15 bp, Homo sapiens
gtctgtcgcctgcag

SEQ ID NO: 1897168 - DNA, 15 bp, Homo sapiens
tctgtcgcctgcagc

SEQ ID NO: 1897169 - DNA, 15 bp, Homo sapiens
ctgtcgcctgcagcc

SEQ ID NO: 1897170 - DNA, 15 bp, Homo sapiens
tgtcgcctgcagcct

SEQ ID NO: 1897171 - DNA, 15 bp, Homo sapiens
gtcgcctgcagcctt

SEQ ID NO: 1897172 - DNA, 15 bp, Homo sapiens
tcgcctgcagcctta

SEQ ID NO: 1897173 - DNA, 15 bp, Homo sapiens
cgcctgcagccttac

SEQ ID NO: 1897174 - DNA, 15 bp, Homo sapiens
gcctgcagccttacg

SEQ ID NO: 1897175 - DNA, 15 bp, Homo sapiens
cctgcagccttacgg

SEQ ID NO: 1897176 - DNA, 15 bp, Homo sapiens
ctgcagccttacggg

SEQ ID NO: 1897177 - DNA, 15 bp, Homo sapiens
tgcagccttacgggc

SEQ ID NO: 1897178 - DNA, 15 bp, Homo sapiens
gcagccttacgggct

SEQ ID NO: 1897179 - DNA, 15 bp, Homo sapiens
cagccttacgggctg

SEQ ID NO: 1897180 - DNA, 15 bp, Homo sapiens
agccttacgggctgg

SEQ ID NO: 1897181 - DNA, 15 bp, Homo sapiens
gccttacgggctggc

SEQ ID NO: 1897182 - DNA, 15 bp, Homo sapiens
ccttacgggctggct

SEQ ID NO: 1897183 - DNA, 15 bp, Homo sapiens
cttacgggctggctg

SEQ ID NO: 1897184 - DNA, 15 bp, Homo sapiens
ttacgggctggctgg

SEQ ID NO: 1897185 - DNA, 15 bp, Homo sapiens
tacgggctggctggt

SEQ ID NO: 1897186 - DNA, 15 bp, Homo sapiens
acgggctggctggtc

SEQ ID NO: 1897187 - DNA, 15 bp, Homo sapiens
cgggctggctggtcg

SEQ ID NO: 1897188 - DNA, 15 bp, Homo sapiens
gggctggctggtcgt

SEQ ID NO: 1897189 - DNA, 15 bp, Homo sapiens
ggctggctggtcgtg

SEQ ID NO: 1897190 - DNA, 15 bp, Homo sapiens
gctggctggtcgtgg

SEQ ID NO: 1897191 - DNA, 15 bp, Homo sapiens
ctggctggtcgtggg

SEQ ID NO: 1897192 - DNA, 15 bp, Homo sapiens
tggctggtcgtgggt

SEQ ID NO: 1897193 - DNA, 15 bp, Homo sapiens
ggctggtcgtgggta

SEQ ID NO: 1897194 - DNA, 15 bp, Homo sapiens
gctggtcgtgggtag

SEQ ID NO: 1897195 - DNA, 15 bp, Homo sapiens
ctggtcgtgggtagg

SEQ ID NO: 1897196 - DNA, 15 bp, Homo sapiens
tggtcgtgggtaggc

SEQ ID NO: 1897197 - DNA, 15 bp, Homo sapiens
ggtcgtgggtaggct

SEQ ID NO: 1897198 - DNA, 15 bp, Homo sapiens
gtcgtgggtaggctt

SEQ ID NO: 1897199 - DNA, 15 bp, Homo sapiens
tcgtgggtaggcttt

SEQ ID NO: 1897200 - DNA, 15 bp, Homo sapiens
cgtgggtaggcttta

SEQ ID NO: 1897201 - DNA, 15 bp, Homo sapiens
gtgggtaggctttat

SEQ ID NO: 1897202 - DNA, 15 bp, Homo sapiens
tgggtaggctttatt

SEQ ID NO: 1897203 - DNA, 15 bp, Homo sapiens
gggtaggctttattg

SEQ ID NO: 1897204 - DNA, 15 bp, Homo sapiens
ggtaggctttattgc

SEQ ID NO: 1897205 - DNA, 15 bp, Homo sapiens
gtaggctttattgca

SEQ ID NO: 1897206 - DNA, 15 bp, Homo sapiens
taggctttattgcat

SEQ ID NO: 1897207 - DNA, 15 bp, Homo sapiens
aggctttattgcata

SEQ ID NO: 1897208 - DNA, 15 bp, Homo sapiens
ggctttattgcataa

SEQ ID NO: 1897209 - DNA, 15 bp, Homo sapiens
gctttattgcataag

SEQ ID NO: 1897210 - DNA, 15 bp, Homo sapiens
ctttattgcataaga

SEQ ID NO: 1897211 - DNA, 15 bp, Homo sapiens
tttattgcataagaa

SEQ ID NO: 1897212 - DNA, 15 bp, Homo sapiens
ttattgcataagaat

SEQ ID NO: 1897213 - DNA, 15 bp, Homo sapiens
tattgcataagaatc

SEQ ID NO: 1897214 - DNA, 15 bp, Homo sapiens
attgcataagaatca

SEQ ID NO: 1897215 - DNA, 15 bp, Homo sapiens
ttgcataagaatcaa

SEQ ID NO: 1897216 - DNA, 15 bp, Homo sapiens
tgcataagaatcaag

SEQ ID NO: 1897217 - DNA, 15 bp, Homo sapiens
gcataagaatcaagt

SEQ ID NO: 1897218 - DNA, 15 bp, Homo sapiens
cataagaatcaagtt

SEQ ID NO: 1897219 - DNA, 15 bp, Homo sapiens
ataagaatcaagttt

SEQ ID NO: 1897220 - DNA, 15 bp, Homo sapiens
taagaatcaagtttc

SEQ ID NO: 1897221 - DNA, 15 bp, Homo sapiens
aagaatcaagtttcc

SEQ ID NO: 1897222 - DNA, 15 bp, Homo sapiens
agaatcaagtttcct

SEQ ID NO: 1897223 - DNA, 15 bp, Homo sapiens
gaatcaagtttcctg

SEQ ID NO: 1897224 - DNA, 15 bp, Homo sapiens
aatcaagtttcctgt

SEQ ID NO: 1897225 - DNA, 15 bp, Homo sapiens
atcaagtttcctgta

SEQ ID NO: 1897226 - DNA, 15 bp, Homo sapiens
tcaagtttcctgtag

SEQ ID NO: 1897227 - DNA, 15 bp, Homo sapiens
caagtttcctgtagg

SEQ ID NO: 1897228 - DNA, 15 bp, Homo sapiens
aagtttcctgtaggg

SEQ ID NO: 1897229 - DNA, 15 bp, Homo sapiens
agtttcctgtaggga

SEQ ID NO: 1897230 - DNA, 15 bp, Homo sapiens
gtttcctgtagggaa

SEQ ID NO: 1897231 - DNA, 15 bp, Homo sapiens
tttcctgtagggaaa

SEQ ID NO: 1897232 - DNA, 15 bp, Homo sapiens
ttcctgtagggaaat

SEQ ID NO: 1897233 - DNA, 15 bp, Homo sapiens
tcctgtagggaaatt

SEQ ID NO: 1897234 - DNA, 15 bp, Homo sapiens
cctgtagggaaattg

SEQ ID NO: 1897235 - DNA, 15 bp, Homo sapiens
ctgtagggaaattga

SEQ ID NO: 1897236 - DNA, 15 bp, Homo sapiens
tgtagggaaattgac

SEQ ID NO: 1897237 - DNA, 15 bp, Homo sapiens
gtagggaaattgaca

SEQ ID NO: 1897238 - DNA, 15 bp, Homo sapiens
tagggaaattgacag

SEQ ID NO: 1897239 - DNA, 15 bp, Homo sapiens
agggaaattgacaga

SEQ ID NO: 1897240 - DNA, 15 bp, Homo sapiens
gggaaattgacagac

SEQ ID NO: 1897241 - DNA, 15 bp, Homo sapiens
ggaaattgacagacc

SEQ ID NO: 1897242 - DNA, 15 bp, Homo sapiens
gaaattgacagaccg

SEQ ID NO: 1897243 - DNA, 15 bp, Homo sapiens
aaattgacagaccgg

SEQ ID NO: 1897244 - DNA, 15 bp, Homo sapiens
aattgacagaccggt

SEQ ID NO: 1897245 - DNA, 15 bp, Homo sapiens
attgacagaccggta

SEQ ID NO: 1897246 - DNA, 15 bp, Homo sapiens
ttgacagaccggtac

SEQ ID NO: 1897247 - DNA, 15 bp, Homo sapiens
tgacagaccggtact

SEQ ID NO: 1897248 - DNA, 15 bp, Homo sapiens
gacagaccggtactc

SEQ ID NO: 1897249 - DNA, 15 bp, Homo sapiens
acagaccggtactct

SEQ ID NO: 1897250 - DNA, 15 bp, Homo sapiens
cagaccggtactctt

SEQ ID NO: 1897251 - DNA, 15 bp, Homo sapiens
agaccggtactcttt

SEQ ID NO: 1897252 - DNA, 15 bp, Homo sapiens
gaccggtactctttc

SEQ ID NO: 1897253 - DNA, 15 bp, Homo sapiens
accggtactctttct

SEQ ID NO: 1897254 - DNA, 15 bp, Homo sapiens
ccggtactctttcta

SEQ ID NO: 1897255 - DNA, 15 bp, Homo sapiens
cggtactctttctaa

SEQ ID NO: 1897256 - DNA, 15 bp, Homo sapiens
ggtactctttctaaa

SEQ ID NO: 1897257 - DNA, 15 bp, Homo sapiens
gtactctttctaaat

SEQ ID NO: 1897258 - DNA, 15 bp, Homo sapiens
tactctttctaaatt

SEQ ID NO: 1897259 - DNA, 15 bp, Homo sapiens
actctttctaaattc

SEQ ID NO: 1897260 - DNA, 15 bp, Homo sapiens
ctctttctaaattcc

SEQ ID NO: 1897261 - DNA, 15 bp, Homo sapiens
tctttctaaattccc

SEQ ID NO: 1897262 - DNA, 15 bp, Homo sapiens
ctttctaaattccct

SEQ ID NO: 1897263 - DNA, 15 bp, Homo sapiens
tttctaaattccctc

SEQ ID NO: 1897264 - DNA, 15 bp, Homo sapiens
ttctaaattccctcg

SEQ ID NO: 1897265 - DNA, 15 bp, Homo sapiens
tctaaattccctcgc

SEQ ID NO: 1897266 - DNA, 15 bp, Homo sapiens
ctaaattccctcgca

SEQ ID NO: 1897267 - DNA, 15 bp, Homo sapiens
taaattccctcgcat

SEQ ID NO: 1897268 - DNA, 15 bp, Homo sapiens
aaattccctcgcatc

SEQ ID NO: 1897269 - DNA, 15 bp, Homo sapiens
aattccctcgcatct

SEQ ID NO: 1897270 - DNA, 15 bp, Homo sapiens
attccctcgcatctt

SEQ ID NO: 1897271 - DNA, 15 bp, Homo sapiens
ttccctcgcatcttt

SEQ ID NO: 1897272 - DNA, 15 bp, Homo sapiens
tccctcgcatctttt

SEQ ID NO: 1897273 - DNA, 15 bp, Homo sapiens
ccctcgcatcttttt

SEQ ID NO: 1897274 - DNA, 15 bp, Homo sapiens
cctcgcatctttttc

SEQ ID NO: 1897275 - DNA, 15 bp, Homo sapiens
ctcgcatctttttct

SEQ ID NO: 1897276 - DNA, 15 bp, Homo sapiens
tcgcatctttttcta

SEQ ID NO: 1897277 - DNA, 15 bp, Homo sapiens
cgcatctttttctag

SEQ ID NO: 1897278 - DNA, 15 bp, Homo sapiens
gcatctttttctagg

SEQ ID NO: 1897279 - DNA, 15 bp, Homo sapiens
catctttttctaggt

SEQ ID NO: 1897280 - DNA, 15 bp, Homo sapiens
atctttttctaggtt

SEQ ID NO: 1897281 - DNA, 15 bp, Homo sapiens
tctttttctaggtta

SEQ ID NO: 1897282 - DNA, 15 bp, Homo sapiens
ctttttctaggttaa

SEQ ID NO: 1897283 - DNA, 15 bp, Homo sapiens
tttttctaggttaaa

SEQ ID NO: 1897284 - DNA, 15 bp, Homo sapiens
ttttctaggttaaat

SEQ ID NO: 1897285 - DNA, 15 bp, Homo sapiens
tttctaggttaaatt

SEQ ID NO: 1897286 - DNA, 15 bp, Homo sapiens
ttctaggttaaatta

SEQ ID NO: 1897287 - DNA, 15 bp, Homo sapiens
tctaggttaaattat

SEQ ID NO: 1897288 - DNA, 15 bp, Homo sapiens
ctaggttaaattatg

SEQ ID NO: 1897289 - DNA, 15 bp, Homo sapiens
taggttaaattatgc

SEQ ID NO: 1897290 - DNA, 15 bp, Homo sapiens
aggttaaattatgct

SEQ ID NO: 1897291 - DNA, 15 bp, Homo sapiens
ggttaaattatgctc

SEQ ID NO: 1897292 - DNA, 15 bp, Homo sapiens
gttaaattatgctcc

SEQ ID NO: 1897293 - DNA, 15 bp, Homo sapiens
ttaaattatgctccc

SEQ ID NO: 1897294 - DNA, 15 bp, Homo sapiens
taaattatgctcccc

SEQ ID NO: 1897295 - DNA, 15 bp, Homo sapiens
aaattatgctccccc

SEQ ID NO: 1897296 - DNA, 15 bp, Homo sapiens
aattatgctcccccc

SEQ ID NO: 1897297 - DNA, 15 bp, Homo sapiens
attatgctcccccca

SEQ ID NO: 1897298 - DNA, 15 bp, Homo sapiens
ttatgctccccccac

SEQ ID NO: 1897299 - DNA, 15 bp, Homo sapiens
tatgctccccccacg

SEQ ID NO: 1897300 - DNA, 15 bp, Homo sapiens
atgctccccccacgt

SEQ ID NO: 1897301 - DNA, 15 bp, Homo sapiens
tgctccccccacgtc

SEQ ID NO: 1897302 - DNA, 15 bp, Homo sapiens
gctccccccacgtcc

SEQ ID NO: 1897303 - DNA, 15 bp, Homo sapiens
ctccccccacgtccc

SEQ ID NO: 1897304 - DNA, 15 bp, Homo sapiens
tccccccacgtcccc

SEQ ID NO: 1897305 - DNA, 15 bp, Homo sapiens
cccccacgtccccgc

SEQ ID NO: 1897306 - DNA, 15 bp, Homo sapiens
ccccacgtccccgcc

SEQ ID NO: 1897307 - DNA, 15 bp, Homo sapiens
cccacgtccccgcct

SEQ ID NO: 1897308 - DNA, 15 bp, Homo sapiens
ccacgtccccgcctt

SEQ ID NO: 1897309 - DNA, 15 bp, Homo sapiens
cacgtccccgccttg

SEQ ID NO: 1897310 - DNA, 15 bp, Homo sapiens
acgtccccgccttgt

SEQ ID NO: 1897311 - DNA, 15 bp, Homo sapiens
cgtccccgccttgta

SEQ ID NO: 1897312 - DNA, 15 bp, Homo sapiens
gtccccgccttgtaa

SEQ ID NO: 1897313 - DNA, 15 bp, Homo sapiens
tccccgccttgtaaa

SEQ ID NO: 1897314 - DNA, 15 bp, Homo sapiens
ccccgccttgtaaaa

SEQ ID NO: 1897315 - DNA, 15 bp, Homo sapiens
cccgccttgtaaaaa

SEQ ID NO: 1897316 - DNA, 15 bp, Homo sapiens
ccgccttgtaaaaaa

SEQ ID NO: 1897317 - DNA, 15 bp, Homo sapiens
cgccttgtaaaaaag

SEQ ID NO: 1897318 - DNA, 15 bp, Homo sapiens
gccttgtaaaaaaga

SEQ ID NO: 1897319 - DNA, 15 bp, Homo sapiens
ccttgtaaaaaagag

SEQ ID NO: 1897320 - DNA, 15 bp, Homo sapiens
cttgtaaaaaagaga

SEQ ID NO: 1897321 - DNA, 15 bp, Homo sapiens
ttgtaaaaaagagaa

SEQ ID NO: 1897322 - DNA, 15 bp, Homo sapiens
tgtaaaaaagagaaa

SEQ ID NO: 1897323 - DNA, 15 bp, Homo sapiens
gtaaaaaagagaaaa

SEQ ID NO: 1897324 - DNA, 15 bp, Homo sapiens
taaaaaagagaaaaa

SEQ ID NO: 1897325 - DNA, 15 bp, Homo sapiens
aaaaaagagaaaaaa

SEQ ID NO: 1897326 - DNA, 15 bp, Homo sapiens
aaaaagagaaaaaaa

SEQ ID NO: 1897327 - DNA, 15 bp, Homo sapiens
aaagagaaaaaaaga

SEQ ID NO: 1897328 - DNA, 15 bp, Homo sapiens
aagagaaaaaaagac

SEQ ID NO: 1897329 - DNA, 15 bp, Homo sapiens
agagaaaaaaagaca

SEQ ID NO: 1897330 - DNA, 15 bp, Homo sapiens
gagaaaaaaagacaa

SEQ ID NO: 1897331 - DNA, 15 bp, Homo sapiens
agaaaaaaagacaaa

SEQ ID NO: 1897332 - DNA, 15 bp, Homo sapiens
gaaaaaaagacaaaa

SEQ ID NO: 1897333 - DNA, 15 bp, Homo sapiens
aaaaaaagacaaaat

SEQ ID NO: 1897334 - DNA, 15 bp, Homo sapiens
aaaaaagacaaaata

SEQ ID NO: 1897335 - DNA, 15 bp, Homo sapiens
aaaaagacaaaataa

SEQ ID NO: 1897336 - DNA, 15 bp, Homo sapiens
aaaagacaaaataaa

SEQ ID NO: 1897337 - DNA, 15 bp, Homo sapiens
aaagacaaaataaaa

SEQ ID NO: 1897338 - DNA, 15 bp, Homo sapiens
aagacaaaataaaat

SEQ ID NO: 1897339 - DNA, 15 bp, Homo sapiens
agacaaaataaaatc

SEQ ID NO: 1897340 - DNA, 15 bp, Homo sapiens
gacaaaataaaatcc

SEQ ID NO: 1897341 - DNA, 15 bp, Homo sapiens
acaaaataaaatccc

SEQ ID NO: 1897342 - DNA, 15 bp, Homo sapiens
caaaataaaatcccc

SEQ ID NO: 1897343 - DNA, 15 bp, Homo sapiens
aaaataaaatcccca

SEQ ID NO: 1897344 - DNA, 15 bp, Homo sapiens
aaataaaatccccat

SEQ ID NO: 1897345 - DNA, 15 bp, Homo sapiens
aataaaatccccatc

SEQ ID NO: 1897346 - DNA, 15 bp, Homo sapiens
ataaaatccccatca

SEQ ID NO: 1897347 - DNA, 15 bp, Homo sapiens
taaaatccccatcaa

SEQ ID NO: 1897348 - DNA, 15 bp, Homo sapiens
aaaatccccatcaac

SEQ ID NO: 1897349 - DNA, 15 bp, Homo sapiens
aaatccccatcaacc

SEQ ID NO: 1897350 - DNA, 15 bp, Homo sapiens
aatccccatcaaccc

SEQ ID NO: 1897351 - DNA, 15 bp, Homo sapiens
atccccatcaacccg

SEQ ID NO: 1897352 - DNA, 15 bp, Homo sapiens
tccccatcaacccgt

SEQ ID NO: 1897353 - DNA, 15 bp, Homo sapiens
ccccatcaacccgtc

SEQ ID NO: 1897354 - DNA, 15 bp, Homo sapiens
cccatcaacccgtca

SEQ ID NO: 1897355 - DNA, 15 bp, Homo sapiens
ccatcaacccgtcaa

SEQ ID NO: 1897356 - DNA, 15 bp, Homo sapiens
catcaacccgtcaag

SEQ ID NO: 1897357 - DNA, 15 bp, Homo sapiens
atcaacccgtcaagc

SEQ ID NO: 1897358 - DNA, 15 bp, Homo sapiens
tcaacccgtcaagcc

SEQ ID NO: 1897359 - DNA, 15 bp, Homo sapiens
caacccgtcaagcca

SEQ ID NO: 1897360 - DNA, 15 bp, Homo sapiens
aacccgtcaagccag

SEQ ID NO: 1897361 - DNA, 15 bp, Homo sapiens
acccgtcaagccagc

SEQ ID NO: 1897362 - DNA, 15 bp, Homo sapiens
cccgtcaagccagct

SEQ ID NO: 1897363 - DNA, 15 bp, Homo sapiens
ccgtcaagccagctc

SEQ ID NO: 1897364 - DNA, 15 bp, Homo sapiens
cgtcaagccagctct

SEQ ID NO: 1897365 - DNA, 15 bp, Homo sapiens
gtcaagccagctcta

SEQ ID NO: 1897366 - DNA, 15 bp, Homo sapiens
tcaagccagctctag

SEQ ID NO: 1897367 - DNA, 15 bp, Homo sapiens
caagccagctctaga

SEQ ID NO: 1897368 - DNA, 15 bp, Homo sapiens
aagccagctctagag

SEQ ID NO: 1897369 - DNA, 15 bp, Homo sapiens
agccagctctagaga

SEQ ID NO: 1897370 - DNA, 15 bp, Homo sapiens
gccagctctagagag

SEQ ID NO: 1897371 - DNA, 15 bp, Homo sapiens
ccagctctagagaga

SEQ ID NO: 1897372 - DNA, 15 bp, Homo sapiens
cagctctagagagag

SEQ ID NO: 1897373 - DNA, 15 bp, Homo sapiens
agctctagagagaga

SEQ ID NO: 1897374 - DNA, 15 bp, Homo sapiens
gctctagagagagaa

SEQ ID NO: 1897375 - DNA, 15 bp, Homo sapiens
ctctagagagagaaa

SEQ ID NO: 1897376 - DNA, 15 bp, Homo sapiens
tctagagagagaaat

SEQ ID NO: 1897377 - DNA, 15 bp, Homo sapiens
ctagagagagaaata

SEQ ID NO: 1897378 - DNA, 15 bp, Homo sapiens
tagagagagaaataa

SEQ ID NO: 1897379 - DNA, 15 bp, Homo sapiens
agagagagaaataaa

SEQ ID NO: 1897380 - DNA, 15 bp, Homo sapiens
gagagagaaataaac

SEQ ID NO: 1897381 - DNA, 15 bp, Homo sapiens
agagagaaataaacc

SEQ ID NO: 1897382 - DNA, 15 bp, Homo sapiens
gagagaaataaacct

SEQ ID NO: 1897383 - DNA, 15 bp, Homo sapiens
agagaaataaacctc

SEQ ID NO: 1897384 - DNA, 15 bp, Homo sapiens
gagaaataaacctct

SEQ ID NO: 1897385 - DNA, 15 bp, Homo sapiens
agaaataaacctctt

SEQ ID NO: 1897386 - DNA, 15 bp, Homo sapiens
gaaataaacctcttg

SEQ ID NO: 1897387 - DNA, 15 bp, Homo sapiens
aaataaacctcttga

SEQ ID NO: 1897388 - DNA, 15 bp, Homo sapiens
aataaacctcttgac

SEQ ID NO: 1897389 - DNA, 15 bp, Homo sapiens
ataaacctcttgaca

SEQ ID NO: 1897390 - DNA, 15 bp, Homo sapiens
taaacctcttgacat

SEQ ID NO: 1897391 - DNA, 15 bp, Homo sapiens
aaacctcttgacatt

SEQ ID NO: 1897392 - DNA, 15 bp, Homo sapiens
aacctcttgacattg

SEQ ID NO: 1897393 - DNA, 15 bp, Homo sapiens
acctcttgacattgt

SEQ ID NO: 1897394 - DNA, 15 bp, Homo sapiens
cctcttgacattgtc

SEQ ID NO: 1897395 - DNA, 15 bp, Homo sapiens
ctcttgacattgtcc

SEQ ID NO: 1897396 - DNA, 15 bp, Homo sapiens
tcttgacattgtcct

SEQ ID NO: 1897397 - DNA, 15 bp, Homo sapiens
cttgacattgtcctt

SEQ ID NO: 1897398 - DNA, 15 bp, Homo sapiens
ttgacattgtccttt

SEQ ID NO: 1897399 - DNA, 15 bp, Homo sapiens
tgacattgtcctttt

SEQ ID NO: 1897400 - DNA, 15 bp, Homo sapiens
gacattgtccttttc

SEQ ID NO: 1897401 - DNA, 15 bp, Homo sapiens
acattgtccttttcc

SEQ ID NO: 1897402 - DNA, 15 bp, Homo sapiens
cattgtccttttcca

SEQ ID NO: 1897403 - DNA, 15 bp, Homo sapiens
attgtccttttccaa

SEQ ID NO: 1897404 - DNA, 15 bp, Homo sapiens
ttgtccttttccaaa

SEQ ID NO: 1897405 - DNA, 15 bp, Homo sapiens
tgtccttttccaaat

SEQ ID NO: 1897406 - DNA, 15 bp, Homo sapiens
gtccttttccaaata

SEQ ID NO: 1897407 - DNA, 15 bp, Homo sapiens
tccttttccaaatac

SEQ ID NO: 1897408 - DNA, 15 bp, Homo sapiens
ccttttccaaatacc

SEQ ID NO: 1897409 - DNA, 15 bp, Homo sapiens
cttttccaaatacct

SEQ ID NO: 1897410 - DNA, 15 bp, Homo sapiens
ttttccaaatacctg

SEQ ID NO: 1897411 - DNA, 15 bp, Homo sapiens
tttccaaatacctgg

SEQ ID NO: 1897412 - DNA, 15 bp, Homo sapiens
ttccaaatacctggt

SEQ ID NO: 1897413 - DNA, 15 bp, Homo sapiens
tccaaatacctggta

SEQ ID NO: 1897414 - DNA, 15 bp, Homo sapiens
ccaaatacctggtaa

SEQ ID NO: 1897415 - DNA, 15 bp, Homo sapiens
caaatacctggtaaa

SEQ ID NO: 1897416 - DNA, 15 bp, Homo sapiens
aaatacctggtaaag

SEQ ID NO: 1897417 - DNA, 15 bp, Homo sapiens
aatacctggtaaagt

SEQ ID NO: 1897418 - DNA, 15 bp, Homo sapiens
atacctggtaaagtc

SEQ ID NO: 1897419 - DNA, 15 bp, Homo sapiens
tacctggtaaagtcg

SEQ ID NO: 1897420 - DNA, 15 bp, Homo sapiens
acctggtaaagtcgg

SEQ ID NO: 1897421 - DNA, 15 bp, Homo sapiens
cctggtaaagtcggc

SEQ ID NO: 1897422 - DNA, 15 bp, Homo sapiens
ctggtaaagtcggcc

SEQ ID NO: 1897423 - DNA, 15 bp, Homo sapiens
tggtaaagtcggcca

SEQ ID NO: 1897424 - DNA, 15 bp, Homo sapiens
ggtaaagtcggccag

SEQ ID NO: 1897425 - DNA, 15 bp, Homo sapiens
gtaaagtcggccaga

SEQ ID NO: 1897426 - DNA, 15 bp, Homo sapiens
taaagtcggccagaa

SEQ ID NO: 1897427 - DNA, 15 bp, Homo sapiens
aaagtcggccagaag

SEQ ID NO: 1897428 - DNA, 15 bp, Homo sapiens
aagtcggccagaaga

SEQ ID NO: 1897429 - DNA, 15 bp, Homo sapiens
agtcggccagaagat

SEQ ID NO: 1897430 - DNA, 15 bp, Homo sapiens
gtcggccagaagata

SEQ ID NO: 1897431 - DNA, 15 bp, Homo sapiens
tcggccagaagataa

SEQ ID NO: 1897432 - DNA, 15 bp, Homo sapiens
cggccagaagataaa

SEQ ID NO: 1897433 - DNA, 15 bp, Homo sapiens
ggccagaagataaat

SEQ ID NO: 1897434 - DNA, 15 bp, Homo sapiens
gccagaagataaata

SEQ ID NO: 1897435 - DNA, 15 bp, Homo sapiens
ccagaagataaataa

SEQ ID NO: 1897436 - DNA, 15 bp, Homo sapiens
cagaagataaataat

SEQ ID NO: 1897437 - DNA, 15 bp, Homo sapiens
agaagataaataatt

SEQ ID NO: 1897438 - DNA, 15 bp, Homo sapiens
gaagataaataattg

SEQ ID NO: 1897439 - DNA, 15 bp, Homo sapiens
aagataaataattga

SEQ ID NO: 1897440 - DNA, 15 bp, Homo sapiens
agataaataattgag

SEQ ID NO: 1897441 - DNA, 15 bp, Homo sapiens
gataaataattgagc

SEQ ID NO: 1897442 - DNA, 15 bp, Homo sapiens
ataaataattgagcc

SEQ ID NO: 1897443 - DNA, 15 bp, Homo sapiens
taaataattgagcca

SEQ ID NO: 1897444 - DNA, 15 bp, Homo sapiens
aaataattgagccat

SEQ ID NO: 1897445 - DNA, 15 bp, Homo sapiens
aataattgagccatt

SEQ ID NO: 1897446 - DNA, 15 bp, Homo sapiens
ataattgagccattg

SEQ ID NO: 1897447 - DNA, 15 bp, Homo sapiens
taattgagccattgc

SEQ ID NO: 1897448 - DNA, 15 bp, Homo sapiens
aattgagccattgca

SEQ ID NO: 1897449 - DNA, 15 bp, Homo sapiens
tgagccattgcattt

SEQ ID NO: 1897450 - DNA, 15 bp, Homo sapiens
gagccattgcattta

SEQ ID NO: 1897451 - DNA, 15 bp, Homo sapiens
agccattgcatttac

SEQ ID NO: 1897452 - DNA, 15 bp, Homo sapiens
gccattgcatttact

SEQ ID NO: 1897453 - DNA, 15 bp, Homo sapiens
ccattgcatttactg

SEQ ID NO: 1897454 - DNA, 15 bp, Homo sapiens
cattgcatttactgg

SEQ ID NO: 1897455 - DNA, 15 bp, Homo sapiens
attgcatttactgga

SEQ ID NO: 1897456 - DNA, 15 bp, Homo sapiens
ttgcatttactggat

SEQ ID NO: 1897457 - DNA, 15 bp, Homo sapiens
tgcatttactggatt

SEQ ID NO: 1897458 - DNA, 15 bp, Homo sapiens
gcatttactggattg

SEQ ID NO: 1897459 - DNA, 15 bp, Homo sapiens
catttactggattgt

SEQ ID NO: 1897460 - DNA, 15 bp, Homo sapiens
atttactggattgtg

SEQ ID NO: 1897461 - DNA, 15 bp, Homo sapiens
tttactggattgtgg

SEQ ID NO: 1897462 - DNA, 15 bp, Homo sapiens
ttactggattgtggt

SEQ ID NO: 1897463 - DNA, 15 bp, Homo sapiens
tactggattgtggtg

SEQ ID NO: 1897464 - DNA, 15 bp, Homo sapiens
actggattgtggtgt

SEQ ID NO: 1897465 - DNA, 15 bp, Homo sapiens
ctggattgtggtgtt

SEQ ID NO: 1897466 - DNA, 15 bp, Homo sapiens
tggattgtggtgttg

SEQ ID NO: 1897467 - DNA, 15 bp, Homo sapiens
ggattgtggtgttgc

SEQ ID NO: 1897468 - DNA, 15 bp, Homo sapiens
gattgtggtgttgct

SEQ ID NO: 1897469 - DNA, 15 bp, Homo sapiens
attgtggtgttgctt

SEQ ID NO: 1897470 - DNA, 15 bp, Homo sapiens
ttgtggtgttgctta

SEQ ID NO: 1897471 - DNA, 15 bp, Homo sapiens
tgtggtgttgcttaa

SEQ ID NO: 1897472 - DNA, 15 bp, Homo sapiens
gtggtgttgcttaat

SEQ ID NO: 1897473 - DNA, 15 bp, Homo sapiens
tggtgttgcttaatt

SEQ ID NO: 1897474 - DNA, 15 bp, Homo sapiens
ggtgttgcttaattg

SEQ ID NO: 1897475 - DNA, 15 bp, Homo sapiens
gtgttgcttaattgc

SEQ ID NO: 1897476 - DNA, 15 bp, Homo sapiens
tgttgcttaattgca

SEQ ID NO: 1897477 - DNA, 15 bp, Homo sapiens
gttgcttaattgcat

SEQ ID NO: 1897478 - DNA, 15 bp, Homo sapiens
ttgcttaattgcata

SEQ ID NO: 1897479 - DNA, 15 bp, Homo sapiens
tgcttaattgcatag

SEQ ID NO: 1897480 - DNA, 15 bp, Homo sapiens
gcttaattgcatagg

SEQ ID NO: 1897481 - DNA, 15 bp, Homo sapiens
cttaattgcatagga

SEQ ID NO: 1897482 - DNA, 15 bp, Homo sapiens
ttaattgcataggac

SEQ ID NO: 1897483 - DNA, 15 bp, Homo sapiens
taattgcataggacg

SEQ ID NO: 1897484 - DNA, 15 bp, Homo sapiens
aattgcataggacgg

SEQ ID NO: 1897485 - DNA, 15 bp, Homo sapiens
attgcataggacgga

SEQ ID NO: 1897486 - DNA, 15 bp, Homo sapiens
ttgcataggacggaa

SEQ ID NO: 1897487 - DNA, 15 bp, Homo sapiens
tgcataggacggaat

SEQ ID NO: 1897488 - DNA, 15 bp, Homo sapiens
gcataggacggaatg

SEQ ID NO: 1897489 - DNA, 15 bp, Homo sapiens
cataggacggaatga

SEQ ID NO: 1897490 - DNA, 15 bp, Homo sapiens
ataggacggaatgaa

SEQ ID NO: 1897491 - DNA, 15 bp, Homo sapiens
taggacggaatgaac

SEQ ID NO: 1897492 - DNA, 15 bp, Homo sapiens
aggacggaatgaacc

SEQ ID NO: 1897493 - DNA, 15 bp, Homo sapiens
ggacggaatgaacca

SEQ ID NO: 1897494 - DNA, 15 bp, Homo sapiens
gacggaatgaaccaa

SEQ ID NO: 1897495 - DNA, 15 bp, Homo sapiens
acggaatgaaccaat

SEQ ID NO: 1897496 - DNA, 15 bp, Homo sapiens
cggaatgaaccaatt

SEQ ID NO: 1897497 - DNA, 15 bp, Homo sapiens
ggaatgaaccaattg

SEQ ID NO: 1897498 - DNA, 15 bp, Homo sapiens
gaatgaaccaattga

SEQ ID NO: 1897499 - DNA, 15 bp, Homo sapiens
aatgaaccaattgag

SEQ ID NO: 1897500 - DNA, 15 bp, Homo sapiens
atgaaccaattgaga

SEQ ID NO: 1897501 - DNA, 15 bp, Homo sapiens
tgaaccaattgagag

SEQ ID NO: 1897502 - DNA, 15 bp, Homo sapiens
gaaccaattgagagt

SEQ ID NO: 1897503 - DNA, 15 bp, Homo sapiens
aaccaattgagagtg

SEQ ID NO: 1897504 - DNA, 15 bp, Homo sapiens
accaattgagagtgg

SEQ ID NO: 1897505 - DNA, 15 bp, Homo sapiens
ccaattgagagtggg

SEQ ID NO: 1897506 - DNA, 15 bp, Homo sapiens
caattgagagtggga

SEQ ID NO: 1897507 - DNA, 15 bp, Homo sapiens
aattgagagtgggag

SEQ ID NO: 1897508 - DNA, 15 bp, Homo sapiens
attgagagtgggagt

SEQ ID NO: 1897509 - DNA, 15 bp, Homo sapiens
ttgagagtgggagtt

SEQ ID NO: 1897510 - DNA, 15 bp, Homo sapiens
tgagagtgggagttt

SEQ ID NO: 1897511 - DNA, 15 bp, Homo sapiens
gagagtgggagtttt

SEQ ID NO: 1897512 - DNA, 15 bp, Homo sapiens
agagtgggagttttc

SEQ ID NO: 1897513 - DNA, 15 bp, Homo sapiens
gagtgggagttttct

SEQ ID NO: 1897514 - DNA, 15 bp, Homo sapiens
agtgggagttttctg

SEQ ID NO: 1897515 - DNA, 15 bp, Homo sapiens
gtgggagttttctgt

SEQ ID NO: 1897516 - DNA, 15 bp, Homo sapiens
tgggagttttctgtc

SEQ ID NO: 1897517 - DNA, 15 bp, Homo sapiens
gggagttttctgtct

SEQ ID NO: 1897518 - DNA, 15 bp, Homo sapiens
ggagttttctgtctc

SEQ ID NO: 1897519 - DNA, 15 bp, Homo sapiens
gagttttctgtctca

SEQ ID NO: 1897520 - DNA, 15 bp, Homo sapiens
agttttctgtctcag

SEQ ID NO: 1897521 - DNA, 15 bp, Homo sapiens
gttttctgtctcaga

SEQ ID NO: 1897522 - DNA, 15 bp, Homo sapiens
ttttctgtctcagag

SEQ ID NO: 1897523 - DNA, 15 bp, Homo sapiens
tttctgtctcagagc

SEQ ID NO: 1897524 - DNA, 15 bp, Homo sapiens
ttctgtctcagagcc

SEQ ID NO: 1897525 - DNA, 15 bp, Homo sapiens
tctgtctcagagcca

SEQ ID NO: 1897526 - DNA, 15 bp, Homo sapiens
ctgtctcagagccaa

SEQ ID NO: 1897527 - DNA, 15 bp, Homo sapiens
tgtctcagagccaag

SEQ ID NO: 1897528 - DNA, 15 bp, Homo sapiens
gtctcagagccaaga

SEQ ID NO: 1897529 - DNA, 15 bp, Homo sapiens
tctcagagccaagat

SEQ ID NO: 1897530 - DNA, 15 bp, Homo sapiens
ctcagagccaagatc

SEQ ID NO: 1897531 - DNA, 15 bp, Homo sapiens
tcagagccaagatct

SEQ ID NO: 1897532 - DNA, 15 bp, Homo sapiens
cagagccaagatctt

SEQ ID NO: 1897533 - DNA, 15 bp, Homo sapiens
agagccaagatcttg

SEQ ID NO: 1897534 - DNA, 15 bp, Homo sapiens
gagccaagatcttgg

SEQ ID NO: 1897535 - DNA, 15 bp, Homo sapiens
agccaagatcttggg

SEQ ID NO: 1897536 - DNA, 15 bp, Homo sapiens
gccaagatcttgggt

SEQ ID NO: 1897537 - DNA, 15 bp, Homo sapiens
ccaagatcttgggta

SEQ ID NO: 1897538 - DNA, 15 bp, Homo sapiens
caagatcttgggtaa

SEQ ID NO: 1897539 - DNA, 15 bp, Homo sapiens
aagatcttgggtaaa

SEQ ID NO: 1897540 - DNA, 15 bp, Homo sapiens
agatcttgggtaaat

SEQ ID NO: 1897541 - DNA, 15 bp, Homo sapiens
gatcttgggtaaatg

SEQ ID NO: 1897542 - DNA, 15 bp, Homo sapiens
atcttgggtaaatgc

SEQ ID NO: 1897543 - DNA, 15 bp, Homo sapiens
tcttgggtaaatgca

SEQ ID NO: 1897544 - DNA, 15 bp, Homo sapiens
cttgggtaaatgcag

SEQ ID NO: 1897545 - DNA, 15 bp, Homo sapiens
ttgggtaaatgcaga

SEQ ID NO: 1897546 - DNA, 15 bp, Homo sapiens
tgggtaaatgcagag

SEQ ID NO: 1897547 - DNA, 15 bp, Homo sapiens
gggtaaatgcagagg

SEQ ID NO: 1897548 - DNA, 15 bp, Homo sapiens
ggtaaatgcagagga

SEQ ID NO: 1897549 - DNA, 15 bp, Homo sapiens
gtaaatgcagaggag

SEQ ID NO: 1897550 - DNA, 15 bp, Homo sapiens
taaatgcagaggaga

SEQ ID NO: 1897551 - DNA, 15 bp, Homo sapiens
aaatgcagaggagag

SEQ ID NO: 1897552 - DNA, 15 bp, Homo sapiens
aatgcagaggagagg

SEQ ID NO: 1897553 - DNA, 15 bp, Homo sapiens
atgcagaggagaggg

SEQ ID NO: 1897554 - DNA, 15 bp, Homo sapiens
tgcagaggagaggga

SEQ ID NO: 1897555 - DNA, 15 bp, Homo sapiens
cagaggagagggaaa

SEQ ID NO: 1897556 - DNA, 15 bp, Homo sapiens
agaggagagggaaac

SEQ ID NO: 1897557 - DNA, 15 bp, Homo sapiens
gaggagagggaaaca

SEQ ID NO: 1897558 - DNA, 15 bp, Homo sapiens
aggagagggaaacaa

SEQ ID NO: 1897559 - DNA, 15 bp, Homo sapiens
ggagagggaaacaaa

SEQ ID NO: 1897560 - DNA, 15 bp, Homo sapiens
gagagggaaacaaag

SEQ ID NO: 1897561 - DNA, 15 bp, Homo sapiens
agagggaaacaaaga

SEQ ID NO: 1897562 - DNA, 15 bp, Homo sapiens
gagggaaacaaagac

SEQ ID NO: 1897563 - DNA, 15 bp, Homo sapiens
agggaaacaaagaca

SEQ ID NO: 1897564 - DNA, 15 bp, Homo sapiens
gggaaacaaagacag

SEQ ID NO: 1897565 - DNA, 15 bp, Homo sapiens
ggaaacaaagacagg

SEQ ID NO: 1897566 - DNA, 15 bp, Homo sapiens
gaaacaaagacaggc

SEQ ID NO: 1897567 - DNA, 15 bp, Homo sapiens
aaacaaagacaggct

SEQ ID NO: 1897568 - DNA, 15 bp, Homo sapiens
aacaaagacaggctg

SEQ ID NO: 1897569 - DNA, 15 bp, Homo sapiens
acaaagacaggctgg

SEQ ID NO: 1897570 - DNA, 15 bp, Homo sapiens
caaagacaggctggc

SEQ ID NO: 1897571 - DNA, 15 bp, Homo sapiens
aaagacaggctggcc

SEQ ID NO: 1897572 - DNA, 15 bp, Homo sapiens
aagacaggctggcct

SEQ ID NO: 1897573 - DNA, 15 bp, Homo sapiens
agacaggctggcctt

SEQ ID NO: 1897574 - DNA, 15 bp, Homo sapiens
gacaggctggccttg

SEQ ID NO: 1897575 - DNA, 15 bp, Homo sapiens
acaggctggccttga

SEQ ID NO: 1897576 - DNA, 15 bp, Homo sapiens
aggctggccttgaaa

SEQ ID NO: 1897577 - DNA, 15 bp, Homo sapiens
ggctggccttgaaaa

SEQ ID NO: 1897578 - DNA, 15 bp, Homo sapiens
gctggccttgaaaaa

SEQ ID NO: 1897579 - DNA, 15 bp, Homo sapiens
ctggccttgaaaaaa

SEQ ID NO: 1897580 - DNA, 15 bp, Homo sapiens
tggccttgaaaaaac

SEQ ID NO: 1897581 - DNA, 15 bp, Homo sapiens
ggccttgaaaaaacc

SEQ ID NO: 1897582 - DNA, 15 bp, Homo sapiens
gccttgaaaaaacca

SEQ ID NO: 1897583 - DNA, 15 bp, Homo sapiens
ccttgaaaaaaccat

SEQ ID NO: 1897584 - DNA, 15 bp, Homo sapiens
cttgaaaaaaccatg

SEQ ID NO: 1897585 - DNA, 15 bp, Homo sapiens
ttgaaaaaaccatgt

SEQ ID NO: 1897586 - DNA, 15 bp, Homo sapiens
tgaaaaaaccatgtg

SEQ ID NO: 1897587 - DNA, 15 bp, Homo sapiens
gaaaaaaccatgtgt

SEQ ID NO: 1897588 - DNA, 15 bp, Homo sapiens
aaaaaaccatgtgtg

SEQ ID NO: 1897589 - DNA, 15 bp, Homo sapiens
aaaaaccatgtgtgc

SEQ ID NO: 1897590 - DNA, 15 bp, Homo sapiens
aaaaccatgtgtgca

SEQ ID NO: 1897591 - DNA, 15 bp, Homo sapiens
aaaccatgtgtgcaa

SEQ ID NO: 1897592 - DNA, 15 bp, Homo sapiens
aaccatgtgtgcaaa

SEQ ID NO: 1897593 - DNA, 15 bp, Homo sapiens
accatgtgtgcaaac

SEQ ID NO: 1897594 - DNA, 15 bp, Homo sapiens
ccatgtgtgcaaact

SEQ ID NO: 1897595 - DNA, 15 bp, Homo sapiens
catgtgtgcaaactt

SEQ ID NO: 1897596 - DNA, 15 bp, Homo sapiens
atgtgtgcaaacttt

SEQ ID NO: 1897597 - DNA, 15 bp, Homo sapiens
tgtgtgcaaacttta

SEQ ID NO: 1897598 - DNA, 15 bp, Homo sapiens
gtgtgcaaactttac

SEQ ID NO: 1897599 - DNA, 15 bp, Homo sapiens
tgtgcaaactttaca

SEQ ID NO: 1897600 - DNA, 15 bp, Homo sapiens
gtgcaaactttacat

SEQ ID NO: 1897601 - DNA, 15 bp, Homo sapiens
tgcaaactttacatg

SEQ ID NO: 1897602 - DNA, 15 bp, Homo sapiens
gcaaactttacatgc

SEQ ID NO: 1897603 - DNA, 15 bp, Homo sapiens
caaactttacatgca

SEQ ID NO: 1897604 - DNA, 15 bp, Homo sapiens
aaactttacatgcat

SEQ ID NO: 1897605 - DNA, 15 bp, Homo sapiens
aactttacatgcatt

SEQ ID NO: 1897606 - DNA, 15 bp, Homo sapiens
actttacatgcattt

SEQ ID NO: 1897607 - DNA, 15 bp, Homo sapiens
ctttacatgcatttg

SEQ ID NO: 1897608 - DNA, 15 bp, Homo sapiens
tttacatgcatttgg

SEQ ID NO: 1897609 - DNA, 15 bp, Homo sapiens
ttacatgcatttggg

SEQ ID NO: 1897610 - DNA, 15 bp, Homo sapiens
tacatgcatttgggg

SEQ ID NO: 1897611 - DNA, 15 bp, Homo sapiens
acatgcatttggggg

SEQ ID NO: 1897612 - DNA, 15 bp, Homo sapiens
catgcatttgggggg

SEQ ID NO: 1897613 - DNA, 15 bp, Homo sapiens
atgcatttggggggt

SEQ ID NO: 1897614 - DNA, 15 bp, Homo sapiens
tgcatttggggggtg

SEQ ID NO: 1897615 - DNA, 15 bp, Homo sapiens
gcatttggggggtgt

SEQ ID NO: 1897616 - DNA, 15 bp, Homo sapiens
catttggggggtgtg

SEQ ID NO: 1897617 - DNA, 15 bp, Homo sapiens
atttggggggtgtgg

SEQ ID NO: 1897618 - DNA, 15 bp, Homo sapiens
tttggggggtgtggt

SEQ ID NO: 1897619 - DNA, 15 bp, Homo sapiens
ttggggggtgtggtt

SEQ ID NO: 1897620 - DNA, 15 bp, Homo sapiens
tggggggtgtggttg

SEQ ID NO: 1897621 - DNA, 15 bp, Homo sapiens
ggggggtgtggttgc

SEQ ID NO: 1897622 - DNA, 15 bp, Homo sapiens
gggggtgtggttgca

SEQ ID NO: 1897623 - DNA, 15 bp, Homo sapiens
ggggtgtggttgcac

SEQ ID NO: 1897624 - DNA, 15 bp, Homo sapiens
gggtgtggttgcact

SEQ ID NO: 1897625 - DNA, 15 bp, Homo sapiens
ggtgtggttgcactg

SEQ ID NO: 1897626 - DNA, 15 bp, Homo sapiens
gtgtggttgcactga

SEQ ID NO: 1897627 - DNA, 15 bp, Homo sapiens
tgtggttgcactgaa

SEQ ID NO: 1897628 - DNA, 15 bp, Homo sapiens
gtggttgcactgaag

SEQ ID NO: 1897629 - DNA, 15 bp, Homo sapiens
tggttgcactgaagt

SEQ ID NO: 1897630 - DNA, 15 bp, Homo sapiens
ggttgcactgaagtt

SEQ ID NO: 1897631 - DNA, 15 bp, Homo sapiens
gttgcactgaagtta

SEQ ID NO: 1897632 - DNA, 15 bp, Homo sapiens
ttgcactgaagttaa

SEQ ID NO: 1897633 - DNA, 15 bp, Homo sapiens
tgcactgaagttaac

SEQ ID NO: 1897634 - DNA, 15 bp, Homo sapiens
gcactgaagttaaca

SEQ ID NO: 1897635 - DNA, 15 bp, Homo sapiens
cactgaagttaacaa

SEQ ID NO: 1897636 - DNA, 15 bp, Homo sapiens
actgaagttaacaag

SEQ ID NO: 1897637 - DNA, 15 bp, Homo sapiens
ctgaagttaacaaga

SEQ ID NO: 1897638 - DNA, 15 bp, Homo sapiens
tgaagttaacaagat

SEQ ID NO: 1897639 - DNA, 15 bp, Homo sapiens
gaagttaacaagatt

SEQ ID NO: 1897640 - DNA, 15 bp, Homo sapiens
aagttaacaagattc

SEQ ID NO: 1897641 - DNA, 15 bp, Homo sapiens
agttaacaagattca

SEQ ID NO: 1897642 - DNA, 15 bp, Homo sapiens
gttaacaagattcaa

SEQ ID NO: 1897643 - DNA, 15 bp, Homo sapiens
ttaacaagattcaaa

SEQ ID NO: 1897644 - DNA, 15 bp, Homo sapiens
taacaagattcaaac

SEQ ID NO: 1897645 - DNA, 15 bp, Homo sapiens
aacaagattcaaacc

SEQ ID NO: 1897646 - DNA, 15 bp, Homo sapiens
acaagattcaaaccg

SEQ ID NO: 1897647 - DNA, 15 bp, Homo sapiens
caagattcaaaccgt

SEQ ID NO: 1897648 - DNA, 15 bp, Homo sapiens
aagattcaaaccgtc

SEQ ID NO: 1897649 - DNA, 15 bp, Homo sapiens
agattcaaaccgtcg

SEQ ID NO: 1897650 - DNA, 15 bp, Homo sapiens
gattcaaaccgtcgc

SEQ ID NO: 1897651 - DNA, 15 bp, Homo sapiens
attcaaaccgtcgcc

SEQ ID NO: 1897652 - DNA, 15 bp, Homo sapiens
ttcaaaccgtcgccc

SEQ ID NO: 1897653 - DNA, 15 bp, Homo sapiens
tcaaaccgtcgccca

SEQ ID NO: 1897654 - DNA, 15 bp, Homo sapiens
caaaccgtcgcccaa

SEQ ID NO: 1897655 - DNA, 15 bp, Homo sapiens
aaaccgtcgcccaag

SEQ ID NO: 1897656 - DNA, 15 bp, Homo sapiens
aaccgtcgcccaagt

SEQ ID NO: 1897657 - DNA, 15 bp, Homo sapiens
accgtcgcccaagtt

SEQ ID NO: 1897658 - DNA, 15 bp, Homo sapiens
ccgtcgcccaagttg

SEQ ID NO: 1897659 - DNA, 15 bp, Homo sapiens
cgtcgcccaagttgg

SEQ ID NO: 1897660 - DNA, 15 bp, Homo sapiens
gtcgcccaagttggt

SEQ ID NO: 1897661 - DNA, 15 bp, Homo sapiens
tcgcccaagttggta

SEQ ID NO: 1897662 - DNA, 15 bp, Homo sapiens
cgcccaagttggtat

SEQ ID NO: 1897663 - DNA, 15 bp, Homo sapiens
gcccaagttggtatt

SEQ ID NO: 1897664 - DNA, 15 bp, Homo sapiens
cccaagttggtattt

SEQ ID NO: 1897665 - DNA, 15 bp, Homo sapiens
ccaagttggtatttc

SEQ ID NO: 1897666 - DNA, 15 bp, Homo sapiens
caagttggtatttcc

SEQ ID NO: 1897667 - DNA, 15 bp, Homo sapiens
aagttggtatttcca

SEQ ID NO: 1897668 - DNA, 15 bp, Homo sapiens
agttggtatttccat

SEQ ID NO: 1897669 - DNA, 15 bp, Homo sapiens
gttggtatttccatg

SEQ ID NO: 1897670 - DNA, 15 bp, Homo sapiens
ttggtatttccatgt

SEQ ID NO: 1897671 - DNA, 15 bp, Homo sapiens
tggtatttccatgtt

SEQ ID NO: 1897672 - DNA, 15 bp, Homo sapiens
ggtatttccatgttt

SEQ ID NO: 1897673 - DNA, 15 bp, Homo sapiens
gtatttccatgtttg

SEQ ID NO: 1897674 - DNA, 15 bp, Homo sapiens
tatttccatgtttgg

SEQ ID NO: 1897675 - DNA, 15 bp, Homo sapiens
atttccatgtttggt

SEQ ID NO: 1897676 - DNA, 15 bp, Homo sapiens
tttccatgtttggta

SEQ ID NO: 1897677 - DNA, 15 bp, Homo sapiens
ttccatgtttggtac

SEQ ID NO: 1897678 - DNA, 15 bp, Homo sapiens
tccatgtttggtaca

SEQ ID NO: 1897679 - DNA, 15 bp, Homo sapiens
ccatgtttggtacac

SEQ ID NO: 1897680 - DNA, 15 bp, Homo sapiens
catgtttggtacaca

SEQ ID NO: 1897681 - DNA, 15 bp, Homo sapiens
atgtttggtacacat

SEQ ID NO: 1897682 - DNA, 15 bp, Homo sapiens
tgtttggtacacatc

SEQ ID NO: 1897683 - DNA, 15 bp, Homo sapiens
gtttggtacacatca

SEQ ID NO: 1897684 - DNA, 15 bp, Homo sapiens
tttggtacacatcac

SEQ ID NO: 1897685 - DNA, 15 bp, Homo sapiens
ttggtacacatcact

SEQ ID NO: 1897686 - DNA, 15 bp, Homo sapiens
tggtacacatcactc

SEQ ID NO: 1897687 - DNA, 15 bp, Homo sapiens
ggtacacatcactct

SEQ ID NO: 1897688 - DNA, 15 bp, Homo sapiens
gtacacatcactctg

SEQ ID NO: 1897689 - DNA, 15 bp, Homo sapiens
tacacatcactctgt

SEQ ID NO: 1897690 - DNA, 15 bp, Homo sapiens
acacatcactctgtg

SEQ ID NO: 1897691 - DNA, 15 bp, Homo sapiens
cacatcactctgtgc

SEQ ID NO: 1897692 - DNA, 15 bp, Homo sapiens
acatcactctgtgcc

SEQ ID NO: 1897693 - DNA, 15 bp, Homo sapiens
catcactctgtgcca

SEQ ID NO: 1897694 - DNA, 15 bp, Homo sapiens
atcactctgtgccat

SEQ ID NO: 1897695 - DNA, 15 bp, Homo sapiens
tcactctgtgccata

SEQ ID NO: 1897696 - DNA, 15 bp, Homo sapiens
cactctgtgccatat

SEQ ID NO: 1897697 - DNA, 15 bp, Homo sapiens
actctgtgccatatc

SEQ ID NO: 1897698 - DNA, 15 bp, Homo sapiens
ctctgtgccatatca

SEQ ID NO: 1897699 - DNA, 15 bp, Homo sapiens
tctgtgccatatcag

SEQ ID NO: 1897700 - DNA, 15 bp, Homo sapiens
ctgtgccatatcagg

SEQ ID NO: 1897701 - DNA, 15 bp, Homo sapiens
tgtgccatatcaggt

SEQ ID NO: 1897702 - DNA, 15 bp, Homo sapiens
gtgccatatcaggtc

SEQ ID NO: 1897703 - DNA, 15 bp, Homo sapiens
tgccatatcaggtcg

SEQ ID NO: 1897704 - DNA, 15 bp, Homo sapiens
gccatatcaggtcgt

SEQ ID NO: 1897705 - DNA, 15 bp, Homo sapiens
ccatatcaggtcgtt

SEQ ID NO: 1897706 - DNA, 15 bp, Homo sapiens
catatcaggtcgttg

SEQ ID NO: 1897707 - DNA, 15 bp, Homo sapiens
atatcaggtcgttgt

SEQ ID NO: 1897708 - DNA, 15 bp, Homo sapiens
tatcaggtcgttgtt

SEQ ID NO: 1897709 - DNA, 15 bp, Homo sapiens
atcaggtcgttgtta

SEQ ID NO: 1897710 - DNA, 15 bp, Homo sapiens
tcaggtcgttgttaa

SEQ ID NO: 1897711 - DNA, 15 bp, Homo sapiens
caggtcgttgttaag

SEQ ID NO: 1897712 - DNA, 15 bp, Homo sapiens
aggtcgttgttaagt

SEQ ID NO: 1897713 - DNA, 15 bp, Homo sapiens
ggtcgttgttaagtg

SEQ ID NO: 1897714 - DNA, 15 bp, Homo sapiens
gtcgttgttaagtgt

SEQ ID NO: 1897715 - DNA, 15 bp, Homo sapiens
tcgttgttaagtgtg

SEQ ID NO: 1897716 - DNA, 15 bp, Homo sapiens
cgttgttaagtgtgg

SEQ ID NO: 1897717 - DNA, 15 bp, Homo sapiens
gttgttaagtgtggt

SEQ ID NO: 1897718 - DNA, 15 bp, Homo sapiens
ttgttaagtgtggtg

SEQ ID NO: 1897719 - DNA, 15 bp, Homo sapiens
tgttaagtgtggtga

SEQ ID NO: 1897720 - DNA, 15 bp, Homo sapiens
gttaagtgtggtgac

SEQ ID NO: 1897721 - DNA, 15 bp, Homo sapiens
ttaagtgtggtgaca

SEQ ID NO: 1897722 - DNA, 15 bp, Homo sapiens
taagtgtggtgacaa

SEQ ID NO: 1897723 - DNA, 15 bp, Homo sapiens
aagtgtggtgacaaa

SEQ ID NO: 1897724 - DNA, 15 bp, Homo sapiens
agtgtggtgacaaaa

SEQ ID NO: 1897725 - DNA, 15 bp, Homo sapiens
gtgtggtgacaaaat

SEQ ID NO: 1897726 - DNA, 15 bp, Homo sapiens
tgtggtgacaaaatc

SEQ ID NO: 1897727 - DNA, 15 bp, Homo sapiens
gtggtgacaaaatca

SEQ ID NO: 1897728 - DNA, 15 bp, Homo sapiens
tggtgacaaaatcag

SEQ ID NO: 1897729 - DNA, 15 bp, Homo sapiens
ggtgacaaaatcagt

SEQ ID NO: 1897730 - DNA, 15 bp, Homo sapiens
gtgacaaaatcagtg

SEQ ID NO: 1897731 - DNA, 15 bp, Homo sapiens
tgacaaaatcagtgg

SEQ ID NO: 1897732 - DNA, 15 bp, Homo sapiens
gacaaaatcagtggt

SEQ ID NO: 1897733 - DNA, 15 bp, Homo sapiens
acaaaatcagtggtt

SEQ ID NO: 1897734 - DNA, 15 bp, Homo sapiens
caaaatcagtggtta

SEQ ID NO: 1897735 - DNA, 15 bp, Homo sapiens
aaaatcagtggttag

SEQ ID NO: 1897736 - DNA, 15 bp, Homo sapiens
aaatcagtggttagt

SEQ ID NO: 1897737 - DNA, 15 bp, Homo sapiens
aatcagtggttagtc

SEQ ID NO: 1897738 - DNA, 15 bp, Homo sapiens
atcagtggttagtca

SEQ ID NO: 1897739 - DNA, 15 bp, Homo sapiens
tcagtggttagtcat

SEQ ID NO: 1897740 - DNA, 15 bp, Homo sapiens
cagtggttagtcatt

SEQ ID NO: 1897741 - DNA, 15 bp, Homo sapiens
agtggttagtcattt

SEQ ID NO: 1897742 - DNA, 15 bp, Homo sapiens
gtggttagtcatttt

SEQ ID NO: 1897743 - DNA, 15 bp, Homo sapiens
tggttagtcattttt

SEQ ID NO: 1897744 - DNA, 15 bp, Homo sapiens
ggttagtcatttttt

SEQ ID NO: 1897745 - DNA, 15 bp, Homo sapiens
gttagtcattttttt

SEQ ID NO: 1897746 - DNA, 15 bp, Homo sapiens
ttagtcattttttta

SEQ ID NO: 1897747 - DNA, 15 bp, Homo sapiens
tagtcatttttttaa

SEQ ID NO: 1897748 - DNA, 15 bp, Homo sapiens
agtcatttttttaat

SEQ ID NO: 1897749 - DNA, 15 bp, Homo sapiens
gtcatttttttaatt

SEQ ID NO: 1897750 - DNA, 15 bp, Homo sapiens
tcatttttttaatta

SEQ ID NO: 1897751 - DNA, 15 bp, Homo sapiens
catttttttaattaa

SEQ ID NO: 1897752 - DNA, 15 bp, Homo sapiens
atttttttaattaaa

SEQ ID NO: 1897753 - DNA, 15 bp, Homo sapiens
tttttttaattaaaa

SEQ ID NO: 1897754 - DNA, 15 bp, Homo sapiens
ttaattaaaaatgtg

SEQ ID NO: 1897755 - DNA, 15 bp, Homo sapiens
taattaaaaatgtgt

SEQ ID NO: 1897756 - DNA, 15 bp, Homo sapiens
aattaaaaatgtgta

SEQ ID NO: 1897757 - DNA, 15 bp, Homo sapiens
attaaaaatgtgtat

SEQ ID NO: 1897758 - DNA, 15 bp, Homo sapiens
ttaaaaatgtgtata

SEQ ID NO: 1897759 - DNA, 15 bp, Homo sapiens
taaaaatgtgtatag

SEQ ID NO: 1897760 - DNA, 15 bp, Homo sapiens
aaaaatgtgtatagt

SEQ ID NO: 1897761 - DNA, 15 bp, Homo sapiens
aaaatgtgtatagtg

SEQ ID NO: 1897762 - DNA, 15 bp, Homo sapiens
aaatgtgtatagtgt

SEQ ID NO: 1897763 - DNA, 15 bp, Homo sapiens
aatgtgtatagtgtg

SEQ ID NO: 1897764 - DNA, 15 bp, Homo sapiens
atgtgtatagtgtgt

SEQ ID NO: 1897765 - DNA, 15 bp, Homo sapiens
tgtgtatagtgtgta

SEQ ID NO: 1897766 - DNA, 15 bp, Homo sapiens
gtgtatagtgtgtac

SEQ ID NO: 1897767 - DNA, 15 bp, Homo sapiens
tgtatagtgtgtacc

SEQ ID NO: 1897768 - DNA, 15 bp, Homo sapiens
gtatagtgtgtacct

SEQ ID NO: 1897769 - DNA, 15 bp, Homo sapiens
tatagtgtgtacctg

SEQ ID NO: 1897770 - DNA, 15 bp, Homo sapiens
atagtgtgtacctgc

SEQ ID NO: 1897771 - DNA, 15 bp, Homo sapiens
tagtgtgtacctgct

SEQ ID NO: 1897772 - DNA, 15 bp, Homo sapiens
agtgtgtacctgctg

SEQ ID NO: 1897773 - DNA, 15 bp, Homo sapiens
gtgtgtacctgctgg

SEQ ID NO: 1897774 - DNA, 15 bp, Homo sapiens
tgtgtacctgctggt

SEQ ID NO: 1897775 - DNA, 15 bp, Homo sapiens
gtgtacctgctggtc

SEQ ID NO: 1897776 - DNA, 15 bp, Homo sapiens
tgtacctgctggtct

SEQ ID NO: 1897777 - DNA, 15 bp, Homo sapiens
gtacctgctggtctt

SEQ ID NO: 1897778 - DNA, 15 bp, Homo sapiens
tacctgctggtctta

SEQ ID NO: 1897779 - DNA, 15 bp, Homo sapiens
acctgctggtcttac

SEQ ID NO: 1897780 - DNA, 15 bp, Homo sapiens
cctgctggtcttact

SEQ ID NO: 1897781 - DNA, 15 bp, Homo sapiens
ctgctggtcttactg

SEQ ID NO: 1897782 - DNA, 15 bp, Homo sapiens
tgctggtcttactgt

SEQ ID NO: 1897783 - DNA, 15 bp, Homo sapiens
gctggtcttactgta

SEQ ID NO: 1897784 - DNA, 15 bp, Homo sapiens
ctggtcttactgtat

SEQ ID NO: 1897785 - DNA, 15 bp, Homo sapiens
tggtcttactgtatg

SEQ ID NO: 1897786 - DNA, 15 bp, Homo sapiens
ggtcttactgtatgt

SEQ ID NO: 1897787 - DNA, 15 bp, Homo sapiens
gtcttactgtatgtg

SEQ ID NO: 1897788 - DNA, 15 bp, Homo sapiens
tcttactgtatgtgc

SEQ ID NO: 1897789 - DNA, 15 bp, Homo sapiens
cttactgtatgtgca

SEQ ID NO: 1897790 - DNA, 15 bp, Homo sapiens
ttactgtatgtgcaa

SEQ ID NO: 1897791 - DNA, 15 bp, Homo sapiens
tactgtatgtgcaac

SEQ ID NO: 1897792 - DNA, 15 bp, Homo sapiens
actgtatgtgcaact

SEQ ID NO: 1897793 - DNA, 15 bp, Homo sapiens
ctgtatgtgcaacta

SEQ ID NO: 1897794 - DNA, 15 bp, Homo sapiens
tgtatgtgcaactaa

SEQ ID NO: 1897795 - DNA, 15 bp, Homo sapiens
gtatgtgcaactaaa

SEQ ID NO: 1897796 - DNA, 15 bp, Homo sapiens
tatgtgcaactaaag

SEQ ID NO: 1897797 - DNA, 15 bp, Homo sapiens
atgtgcaactaaagg

SEQ ID NO: 1897798 - DNA, 15 bp, Homo sapiens
tgtgcaactaaaggt

SEQ ID NO: 1897799 - DNA, 15 bp, Homo sapiens
gtgcaactaaaggtt

SEQ ID NO: 1897800 - DNA, 15 bp, Homo sapiens
tgcaactaaaggttt

SEQ ID NO: 1897801 - DNA, 15 bp, Homo sapiens
gcaactaaaggttta

SEQ ID NO: 1897802 - DNA, 15 bp, Homo sapiens
caactaaaggtttac

SEQ ID NO: 1897803 - DNA, 15 bp, Homo sapiens
aactaaaggtttaca

SEQ ID NO: 1897804 - DNA, 15 bp, Homo sapiens
actaaaggtttacat

SEQ ID NO: 1897805 - DNA, 15 bp, Homo sapiens
ctaaaggtttacata

SEQ ID NO: 1897806 - DNA, 15 bp, Homo sapiens
taaaggtttacatag

SEQ ID NO: 1897807 - DNA, 15 bp, Homo sapiens
aaaggtttacatagt

SEQ ID NO: 1897808 - DNA, 15 bp, Homo sapiens
aaggtttacatagtc

SEQ ID NO: 1897809 - DNA, 15 bp, Homo sapiens
aggtttacatagtct

SEQ ID NO: 1897810 - DNA, 15 bp, Homo sapiens
ggtttacatagtctg

SEQ ID NO: 1897811 - DNA, 15 bp, Homo sapiens
gtttacatagtctgt

SEQ ID NO: 1897812 - DNA, 15 bp, Homo sapiens
tttacatagtctgtg

SEQ ID NO: 1897813 - DNA, 15 bp, Homo sapiens
ttacatagtctgtgt

SEQ ID NO: 1897814 - DNA, 15 bp, Homo sapiens
tacatagtctgtgta

SEQ ID NO: 1897815 - DNA, 15 bp, Homo sapiens
acatagtctgtgtat

SEQ ID NO: 1897816 - DNA, 15 bp, Homo sapiens
catagtctgtgtatg

SEQ ID NO: 1897817 - DNA, 15 bp, Homo sapiens
atagtctgtgtatgg

SEQ ID NO: 1897818 - DNA, 15 bp, Homo sapiens
tagtctgtgtatggg

SEQ ID NO: 1897819 - DNA, 15 bp, Homo sapiens
agtctgtgtatgggt

SEQ ID NO: 1897820 - DNA, 15 bp, Homo sapiens
gtctgtgtatgggtt

SEQ ID NO: 1897821 - DNA, 15 bp, Homo sapiens
tctgtgtatgggttg

SEQ ID NO: 1897822 - DNA, 15 bp, Homo sapiens
ctgtgtatgggttgt

SEQ ID NO: 1897823 - DNA, 15 bp, Homo sapiens
tgtgtatgggttgta

SEQ ID NO: 1897824 - DNA, 15 bp, Homo sapiens
gtgtatgggttgtaa

SEQ ID NO: 1897825 - DNA, 15 bp, Homo sapiens
tgtatgggttgtaaa

SEQ ID NO: 1897826 - DNA, 15 bp, Homo sapiens
gtatgggttgtaaat

SEQ ID NO: 1897827 - DNA, 15 bp, Homo sapiens
tatgggttgtaaatt

SEQ ID NO: 1897828 - DNA, 15 bp, Homo sapiens
atgggttgtaaattt

SEQ ID NO: 1897829 - DNA, 15 bp, Homo sapiens
tgggttgtaaatttt

SEQ ID NO: 1897830 - DNA, 15 bp, Homo sapiens
gggttgtaaattttt

SEQ ID NO: 1897831 - DNA, 15 bp, Homo sapiens
ggttgtaaatttttg

SEQ ID NO: 1897832 - DNA, 15 bp, Homo sapiens
gttgtaaatttttgg

SEQ ID NO: 1897833 - DNA, 15 bp, Homo sapiens
ttgtaaatttttggc

SEQ ID NO: 1897834 - DNA, 15 bp, Homo sapiens
tgtaaatttttggct

SEQ ID NO: 1897835 - DNA, 15 bp, Homo sapiens
gtaaatttttggctg

SEQ ID NO: 1897836 - DNA, 15 bp, Homo sapiens
taaatttttggctgg

SEQ ID NO: 1897837 - DNA, 15 bp, Homo sapiens
aaatttttggctggc

SEQ ID NO: 1897838 - DNA, 15 bp, Homo sapiens
aatttttggctggct

SEQ ID NO: 1897839 - DNA, 15 bp, Homo sapiens
atttttggctggctg

SEQ ID NO: 1897840 - DNA, 15 bp, Homo sapiens
tttttggctggctgt

SEQ ID NO: 1897841 - DNA, 15 bp, Homo sapiens
ttttggctggctgtg

SEQ ID NO: 1897842 - DNA, 15 bp, Homo sapiens
tttggctggctgtgc

SEQ ID NO: 1897843 - DNA, 15 bp, Homo sapiens
ttggctggctgtgct

SEQ ID NO: 1897844 - DNA, 15 bp, Homo sapiens
tggctggctgtgctg

SEQ ID NO: 1897845 - DNA, 15 bp, Homo sapiens
ggctggctgtgctga

SEQ ID NO: 1897846 - DNA, 15 bp, Homo sapiens
gctggctgtgctgat

SEQ ID NO: 1897847 - DNA, 15 bp, Homo sapiens
ctggctgtgctgata

SEQ ID NO: 1897848 - DNA, 15 bp, Homo sapiens
tggctgtgctgataa

SEQ ID NO: 1897849 - DNA, 15 bp, Homo sapiens
ggctgtgctgataaa

SEQ ID NO: 1897850 - DNA, 15 bp, Homo sapiens
gctgtgctgataaag

SEQ ID NO: 1897851 - DNA, 15 bp, Homo sapiens
ctgtgctgataaagc

SEQ ID NO: 1897852 - DNA, 15 bp, Homo sapiens
tgtgctgataaagca

SEQ ID NO: 1897853 - DNA, 15 bp, Homo sapiens
gtgctgataaagcat

SEQ ID NO: 1897854 - DNA, 15 bp, Homo sapiens
tgctgataaagcatt

SEQ ID NO: 1897855 - DNA, 15 bp, Homo sapiens
gctgataaagcattg

SEQ ID NO: 1897856 - DNA, 15 bp, Homo sapiens
ctgataaagcattgg

SEQ ID NO: 1897857 - DNA, 15 bp, Homo sapiens
tgataaagcattggg

SEQ ID NO: 1897858 - DNA, 15 bp, Homo sapiens
gataaagcattgggc

SEQ ID NO: 1897859 - DNA, 15 bp, Homo sapiens
ataaagcattgggct

SEQ ID NO: 1897860 - DNA, 15 bp, Homo sapiens
taaagcattgggctt

SEQ ID NO: 1897861 - DNA, 15 bp, Homo sapiens
aaagcattgggcttg

SEQ ID NO: 1897862 - DNA, 15 bp, Homo sapiens
aagcattgggcttga

SEQ ID NO: 1897863 - DNA, 15 bp, Homo sapiens
agcattgggcttgaa

SEQ ID NO: 1897864 - DNA, 15 bp, Homo sapiens
gcattgggcttgaat

SEQ ID NO: 1897865 - DNA, 15 bp, Homo sapiens
cattgggcttgaata

SEQ ID NO: 1897866 - DNA, 15 bp, Homo sapiens
attgggcttgaataa

SEQ ID NO: 1897867 - DNA, 15 bp, Homo sapiens
ttgggcttgaataaa

SEQ ID NO: 1897868 - DNA, 15 bp, Homo sapiens
tgggcttgaataaag

SEQ ID NO: 1897869 - DNA, 15 bp, Homo sapiens
gggcttgaataaagc

SEQ ID NO: 1897870 - DNA, 15 bp, Homo sapiens
ggcttgaataaagca

SEQ ID NO: 1897871 - DNA, 15 bp, Homo sapiens
gcttgaataaagcaa

SEQ ID NO: 1897872 - DNA, 15 bp, Homo sapiens
cttgaataaagcaaa

SEQ ID NO: 1897873 - DNA, 15 bp, Homo sapiens
ttgaataaagcaaag

SEQ ID NO: 1897874 - DNA, 15 bp, Homo sapiens
tgaataaagcaaagc

SEQ ID NO: 1897875 - DNA, 15 bp, Homo sapiens
gaataaagcaaagca

SEQ ID NO: 1897876 - DNA, 15 bp, Homo sapiens
aataaagcaaagcag

SEQ ID NO: 1897877 - DNA, 15 bp, Homo sapiens
ataaagcaaagcaga

SEQ ID NO: 1897878 - DNA, 15 bp, Homo sapiens
taaagcaaagcagaa

SEQ ID NO: 1897879 - DNA, 15 bp, Homo sapiens
aaagcaaagcagaaa

SEQ ID NO: 1897880 - DNA, 15 bp, Homo sapiens
aagcaaagcagaaaa

SEQ ID NO: 1897881 - DNA, 15 bp, Homo sapiens
agcaaagcagaaaat

SEQ ID NO: 1897882 - DNA, 15 bp, Homo sapiens
gcaaagcagaaaatc

SEQ ID NO: 1897883 - DNA, 15 bp, Homo sapiens
caaagcagaaaatca

SEQ ID NO: 1897884 - DNA, 15 bp, Homo sapiens
aaagcagaaaatcat

SEQ ID NO: 1897885 - DNA, 15 bp, Homo sapiens
aagcagaaaatcatc

SEQ ID NO: 1897886 - DNA, 15 bp, Homo sapiens
agcagaaaatcatct

SEQ ID NO: 1897887 - DNA, 15 bp, Homo sapiens
gcagaaaatcatctc

SEQ ID NO: 1897888 - DNA, 15 bp, Homo sapiens
cagaaaatcatctca

SEQ ID NO: 1897889 - DNA, 15 bp, Homo sapiens
agaaaatcatctcaa

SEQ ID NO: 1897890 - DNA, 15 bp, Homo sapiens
gaaaatcatctcaat

SEQ ID NO: 1897891 - DNA, 15 bp, Homo sapiens
aaaatcatctcaatc

SEQ ID NO: 1897892 - DNA, 15 bp, Homo sapiens
aaatcatctcaatct

SEQ ID NO: 1897893 - DNA, 15 bp, Homo sapiens
aatcatctcaatctt

SEQ ID NO: 1897894 - DNA, 15 bp, Homo sapiens
atcatctcaatcttt

SEQ ID NO: 1897895 - DNA, 15 bp, Homo sapiens
tcatctcaatctttt

SEQ ID NO: 1897896 - DNA, 15 bp, Homo sapiens
catctcaatctttta

SEQ ID NO: 1897897 - DNA, 15 bp, Homo sapiens
atctcaatcttttat

SEQ ID NO: 1897898 - DNA, 15 bp, Homo sapiens
tctcaatcttttata

SEQ ID NO: 1897899 - DNA, 15 bp, Homo sapiens
ctcaatcttttatat

SEQ ID NO: 1897900 - DNA, 15 bp, Homo sapiens
tcaatcttttatatg

SEQ ID NO: 1897901 - DNA, 15 bp, Homo sapiens
caatcttttatatgt

SEQ ID NO: 1897902 - DNA, 15 bp, Homo sapiens
aatcttttatatgtg

SEQ ID NO: 1897903 - DNA, 15 bp, Homo sapiens
atcttttatatgtgg

SEQ ID NO: 1897904 - DNA, 15 bp, Homo sapiens
tcttttatatgtgga

SEQ ID NO: 1897905 - DNA, 15 bp, Homo sapiens
cttttatatgtggat

SEQ ID NO: 1897906 - DNA, 15 bp, Homo sapiens
ttttatatgtggatt

SEQ ID NO: 1897907 - DNA, 15 bp, Homo sapiens
tttatatgtggattt

SEQ ID NO: 1897908 - DNA, 15 bp, Homo sapiens
ttatatgtggattta

SEQ ID NO: 1897909 - DNA, 15 bp, Homo sapiens
tatatgtggatttag

SEQ ID NO: 1897910 - DNA, 15 bp, Homo sapiens
atatgtggatttaga

SEQ ID NO: 1897911 - DNA, 15 bp, Homo sapiens
tatgtggatttagac

SEQ ID NO: 1897912 - DNA, 15 bp, Homo sapiens
atgtggatttagact

SEQ ID NO: 1897913 - DNA, 15 bp, Homo sapiens
tgtggatttagactg

SEQ ID NO: 1897914 - DNA, 15 bp, Homo sapiens
gtggatttagactgt

SEQ ID NO: 1897915 - DNA, 15 bp, Homo sapiens
tggatttagactgtg

SEQ ID NO: 1897916 - DNA, 15 bp, Homo sapiens
ggatttagactgtgt

SEQ ID NO: 1897917 - DNA, 15 bp, Homo sapiens
gatttagactgtgtt

SEQ ID NO: 1897918 - DNA, 15 bp, Homo sapiens
atttagactgtgtta

SEQ ID NO: 1897919 - DNA, 15 bp, Homo sapiens
tttagactgtgttat

SEQ ID NO: 1897920 - DNA, 15 bp, Homo sapiens
ttagactgtgttatg

SEQ ID NO: 1897921 - DNA, 15 bp, Homo sapiens
tagactgtgttatga

SEQ ID NO: 1897922 - DNA, 15 bp, Homo sapiens
agactgtgttatgac

SEQ ID NO: 1897923 - DNA, 15 bp, Homo sapiens
gactgtgttatgact

SEQ ID NO: 1897924 - DNA, 15 bp, Homo sapiens
actgtgttatgactt

SEQ ID NO: 1897925 - DNA, 15 bp, Homo sapiens
ctgtgttatgacttg

SEQ ID NO: 1897926 - DNA, 15 bp, Homo sapiens
tgtgttatgacttgg

SEQ ID NO: 1897927 - DNA, 15 bp, Homo sapiens
gtgttatgacttggt

SEQ ID NO: 1897928 - DNA, 15 bp, Homo sapiens
tgttatgacttggtt

SEQ ID NO: 1897929 - DNA, 15 bp, Homo sapiens
gttatgacttggttc

SEQ ID NO: 1897930 - DNA, 15 bp, Homo sapiens
tatgacttggttcag

SEQ ID NO: 1897931 - DNA, 15 bp, Homo sapiens
atgacttggttcagc

SEQ ID NO: 1897932 - DNA, 15 bp, Homo sapiens
tgacttggttcagcc

SEQ ID NO: 1897933 - DNA, 15 bp, Homo sapiens
gacttggttcagcca

SEQ ID NO: 1897934 - DNA, 15 bp, Homo sapiens
acttggttcagccag

SEQ ID NO: 1897935 - DNA, 15 bp, Homo sapiens
cttggttcagccagt

SEQ ID NO: 1897936 - DNA, 15 bp, Homo sapiens
ttggttcagccagtt

SEQ ID NO: 1897937 - DNA, 15 bp, Homo sapiens
tggttcagccagttt

SEQ ID NO: 1897938 - DNA, 15 bp, Homo sapiens
ggttcagccagtttt

SEQ ID NO: 1897939 - DNA, 15 bp, Homo sapiens
gttcagccagttttc

SEQ ID NO: 1897940 - DNA, 15 bp, Homo sapiens
ttcagccagttttct

SEQ ID NO: 1897941 - DNA, 15 bp, Homo sapiens
tcagccagttttcta

SEQ ID NO: 1897942 - DNA, 15 bp, Homo sapiens
cagccagttttctat

SEQ ID NO: 1897943 - DNA, 15 bp, Homo sapiens
agccagttttctatc

SEQ ID NO: 1897944 - DNA, 15 bp, Homo sapiens
gccagttttctatct

SEQ ID NO: 1897945 - DNA, 15 bp, Homo sapiens
ccagttttctatctt

SEQ ID NO: 1897946 - DNA, 15 bp, Homo sapiens
cagttttctatctta

SEQ ID NO: 1897947 - DNA, 15 bp, Homo sapiens
agttttctatcttat

SEQ ID NO: 1897948 - DNA, 15 bp, Homo sapiens
gttttctatcttatt

SEQ ID NO: 1897949 - DNA, 15 bp, Homo sapiens
ttttctatcttattt

SEQ ID NO: 1897950 - DNA, 15 bp, Homo sapiens
tttctatcttatttt

SEQ ID NO: 1897951 - DNA, 15 bp, Homo sapiens
ttctatcttatttta

SEQ ID NO: 1897952 - DNA, 15 bp, Homo sapiens
tctatcttattttat

SEQ ID NO: 1897953 - DNA, 15 bp, Homo sapiens
ctatcttattttata

SEQ ID NO: 1897954 - DNA, 15 bp, Homo sapiens
tatcttattttatat

SEQ ID NO: 1897955 - DNA, 15 bp, Homo sapiens
atcttattttatatt

SEQ ID NO: 1897956 - DNA, 15 bp, Homo sapiens
tcttattttatatta

SEQ ID NO: 1897957 - DNA, 15 bp, Homo sapiens
cttattttatattaa

SEQ ID NO: 1897958 - DNA, 15 bp, Homo sapiens
ttattttatattaaa

SEQ ID NO: 1897959 - DNA, 15 bp, Homo sapiens
tattttatattaaat

SEQ ID NO: 1897960 - DNA, 15 bp, Homo sapiens
attttatattaaata

SEQ ID NO: 1897961 - DNA, 15 bp, Homo sapiens
ttttatattaaatat

SEQ ID NO: 1897962 - DNA, 15 bp, Homo sapiens
tttatattaaatatg

SEQ ID NO: 1897963 - DNA, 15 bp, Homo sapiens
ttatattaaatatgt

SEQ ID NO: 1897964 - DNA, 15 bp, Homo sapiens
tatattaaatatgtc

SEQ ID NO: 1897965 - DNA, 15 bp, Homo sapiens
atattaaatatgtct

SEQ ID NO: 1897966 - DNA, 15 bp, Homo sapiens
tattaaatatgtctg

SEQ ID NO: 1897967 - DNA, 15 bp, Homo sapiens
attaaatatgtctgt

SEQ ID NO: 1897968 - DNA, 15 bp, Homo sapiens
ttaaatatgtctgtg

SEQ ID NO: 1897969 - DNA, 15 bp, Homo sapiens
taaatatgtctgtgt

SEQ ID NO: 1897970 - DNA, 15 bp, Homo sapiens
aaatatgtctgtgtt

SEQ ID NO: 1897971 - DNA, 15 bp, Homo sapiens
aatatgtctgtgttc

SEQ ID NO: 1897972 - DNA, 15 bp, Homo sapiens
atatgtctgtgttct

SEQ ID NO: 1897973 - DNA, 15 bp, Homo sapiens
tatgtctgtgttctc

SEQ ID NO: 1897974 - DNA, 15 bp, Homo sapiens
atgtctgtgttctct

SEQ ID NO: 1897975 - DNA, 15 bp, Homo sapiens
tgtctgtgttctctg

SEQ ID NO: 1897976 - DNA, 15 bp, Homo sapiens
gtctgtgttctctga

SEQ ID NO: 1897977 - DNA, 15 bp, Homo sapiens
tctgtgttctctgag

SEQ ID NO: 1897978 - DNA, 15 bp, Homo sapiens
ctgtgttctctgagt

SEQ ID NO: 1897979 - DNA, 15 bp, Homo sapiens
tgtgttctctgagtc

SEQ ID NO: 1897980 - DNA, 15 bp, Homo sapiens
gtgttctctgagtca

SEQ ID NO: 1897981 - DNA, 15 bp, Homo sapiens
tgttctctgagtcag

SEQ ID NO: 1897982 - DNA, 15 bp, Homo sapiens
gttctctgagtcagc

SEQ ID NO: 1897983 - DNA, 15 bp, Homo sapiens
ttctctgagtcagca

SEQ ID NO: 1897984 - DNA, 15 bp, Homo sapiens
tctctgagtcagcac

SEQ ID NO: 1897985 - DNA, 15 bp, Homo sapiens
ctctgagtcagcaca

SEQ ID NO: 1897986 - DNA, 15 bp, Homo sapiens
tctgagtcagcacat

SEQ ID NO: 1897987 - DNA, 15 bp, Homo sapiens
ctgagtcagcacatt

SEQ ID NO: 1897988 - DNA, 15 bp, Homo sapiens
tgagtcagcacattt

SEQ ID NO: 1897989 - DNA, 15 bp, Homo sapiens
gagtcagcacattta

SEQ ID NO: 1897990 - DNA, 15 bp, Homo sapiens
agtcagcacatttat

SEQ ID NO: 1897991 - DNA, 15 bp, Homo sapiens
gtcagcacatttatt

SEQ ID NO: 1897992 - DNA, 15 bp, Homo sapiens
tcagcacatttattt

SEQ ID NO: 1897993 - DNA, 15 bp, Homo sapiens
cagcacatttatttc

SEQ ID NO: 1897994 - DNA, 15 bp, Homo sapiens
agcacatttatttcc

SEQ ID NO: 1897995 - DNA, 15 bp, Homo sapiens
gcacatttatttcct

SEQ ID NO: 1897996 - DNA, 15 bp, Homo sapiens
cacatttatttcctt

SEQ ID NO: 1897997 - DNA, 15 bp, Homo sapiens
acatttatttcctta

SEQ ID NO: 1897998 - DNA, 15 bp, Homo sapiens
catttatttccttat

SEQ ID NO: 1897999 - DNA, 15 bp, Homo sapiens
atttatttccttatt

SEQ ID NO: 1898000 - DNA, 15 bp, Homo sapiens
tttatttccttatta

SEQ ID NO: 1898001 - DNA, 15 bp, Homo sapiens
ttatttccttattac

SEQ ID NO: 1898002 - DNA, 15 bp, Homo sapiens
tatttccttattaca

SEQ ID NO: 1898003 - DNA, 15 bp, Homo sapiens
atttccttattacat

SEQ ID NO: 1898004 - DNA, 15 bp, Homo sapiens
tttccttattacatg

SEQ ID NO: 1898005 - DNA, 15 bp, Homo sapiens
ttccttattacatgt

SEQ ID NO: 1898006 - DNA, 15 bp, Homo sapiens
tccttattacatgtt

SEQ ID NO: 1898007 - DNA, 15 bp, Homo sapiens
ccttattacatgttc

SEQ ID NO: 1898008 - DNA, 15 bp, Homo sapiens
cttattacatgttcc

SEQ ID NO: 1898009 - DNA, 15 bp, Homo sapiens
ttattacatgttcca

SEQ ID NO: 1898010 - DNA, 15 bp, Homo sapiens
tattacatgttccag

SEQ ID NO: 1898011 - DNA, 15 bp, Homo sapiens
attacatgttccaga

SEQ ID NO: 1898012 - DNA, 15 bp, Homo sapiens
ttacatgttccagac

SEQ ID NO: 1898013 - DNA, 15 bp, Homo sapiens
tacatgttccagaca

SEQ ID NO: 1898014 - DNA, 15 bp, Homo sapiens
acatgttccagacag

SEQ ID NO: 1898015 - DNA, 15 bp, Homo sapiens
catgttccagacagg

SEQ ID NO: 1898016 - DNA, 15 bp, Homo sapiens
atgttccagacagga

SEQ ID NO: 1898017 - DNA, 15 bp, Homo sapiens
tgttccagacaggag

SEQ ID NO: 1898018 - DNA, 15 bp, Homo sapiens
gttccagacaggagt

SEQ ID NO: 1898019 - DNA, 15 bp, Homo sapiens
ttccagacaggagtg

SEQ ID NO: 1898020 - DNA, 15 bp, Homo sapiens
tccagacaggagtgc

SEQ ID NO: 1898021 - DNA, 15 bp, Homo sapiens
ccagacaggagtgct

SEQ ID NO: 1898022 - DNA, 15 bp, Homo sapiens
cagacaggagtgcta

SEQ ID NO: 1898023 - DNA, 15 bp, Homo sapiens
agacaggagtgctag

SEQ ID NO: 1898024 - DNA, 15 bp, Homo sapiens
gacaggagtgctagc

SEQ ID NO: 1898025 - DNA, 15 bp, Homo sapiens
acaggagtgctagcc

SEQ ID NO: 1898026 - DNA, 15 bp, Homo sapiens
caggagtgctagccc

SEQ ID NO: 1898027 - DNA, 15 bp, Homo sapiens
aggagtgctagccca

SEQ ID NO: 1898028 - DNA, 15 bp, Homo sapiens
ggagtgctagcccag

SEQ ID NO: 1898029 - DNA, 15 bp, Homo sapiens
gagtgctagcccagt

SEQ ID NO: 1898030 - DNA, 15 bp, Homo sapiens
agtgctagcccagtt

SEQ ID NO: 1898031 - DNA, 15 bp, Homo sapiens
gtgctagcccagttt

SEQ ID NO: 1898032 - DNA, 15 bp, Homo sapiens
tgctagcccagtttt

SEQ ID NO: 1898033 - DNA, 15 bp, Homo sapiens
gctagcccagttttt

SEQ ID NO: 1898034 - DNA, 15 bp, Homo sapiens
ctagcccagtttttg

SEQ ID NO: 1898035 - DNA, 15 bp, Homo sapiens
tagcccagtttttgt

SEQ ID NO: 1898036 - DNA, 15 bp, Homo sapiens
agcccagtttttgtt

SEQ ID NO: 1898037 - DNA, 15 bp, Homo sapiens
gcccagtttttgttc

SEQ ID NO: 1898038 - DNA, 15 bp, Homo sapiens
cccagtttttgttca

SEQ ID NO: 1898039 - DNA, 15 bp, Homo sapiens
ccagtttttgttcag

SEQ ID NO: 1898040 - DNA, 15 bp, Homo sapiens
cagtttttgttcagt

SEQ ID NO: 1898041 - DNA, 15 bp, Homo sapiens
agtttttgttcagtt

SEQ ID NO: 1898042 - DNA, 15 bp, Homo sapiens
gtttttgttcagttt

SEQ ID NO: 1898043 - DNA, 15 bp, Homo sapiens
tttttgttcagtttg

SEQ ID NO: 1898044 - DNA, 15 bp, Homo sapiens
ttttgttcagtttgc

SEQ ID NO: 1898045 - DNA, 15 bp, Homo sapiens
tttgttcagtttgca

SEQ ID NO: 1898046 - DNA, 15 bp, Homo sapiens
ttgttcagtttgcac

SEQ ID NO: 1898047 - DNA, 15 bp, Homo sapiens
tgttcagtttgcaca

SEQ ID NO: 1898048 - DNA, 15 bp, Homo sapiens
gttcagtttgcacag

SEQ ID NO: 1898049 - DNA, 15 bp, Homo sapiens
ttcagtttgcacagt

SEQ ID NO: 1898050 - DNA, 15 bp, Homo sapiens
tcagtttgcacagtg

SEQ ID NO: 1898051 - DNA, 15 bp, Homo sapiens
cagtttgcacagtgg

SEQ ID NO: 1898052 - DNA, 15 bp, Homo sapiens
agtttgcacagtggg

SEQ ID NO: 1898053 - DNA, 15 bp, Homo sapiens
gtttgcacagtggga

SEQ ID NO: 1898054 - DNA, 15 bp, Homo sapiens
tttgcacagtgggat

SEQ ID NO: 1898055 - DNA, 15 bp, Homo sapiens
ttgcacagtgggatg

SEQ ID NO: 1898056 - DNA, 15 bp, Homo sapiens
tgcacagtgggatgg

SEQ ID NO: 1898057 - DNA, 15 bp, Homo sapiens
gcacagtgggatggg

SEQ ID NO: 1898058 - DNA, 15 bp, Homo sapiens
cacagtgggatgggg

SEQ ID NO: 1898059 - DNA, 15 bp, Homo sapiens
acagtgggatgggga

SEQ ID NO: 1898060 - DNA, 15 bp, Homo sapiens
cagtgggatggggaa

SEQ ID NO: 1898061 - DNA, 15 bp, Homo sapiens
agtgggatggggaaa

SEQ ID NO: 1898062 - DNA, 15 bp, Homo sapiens
gtgggatggggaaac

SEQ ID NO: 1898063 - DNA, 15 bp, Homo sapiens
tgggatggggaaaca

SEQ ID NO: 1898064 - DNA, 15 bp, Homo sapiens
gggatggggaaacaa

SEQ ID NO: 1898065 - DNA, 15 bp, Homo sapiens
ggatggggaaacaag

SEQ ID NO: 1898066 - DNA, 15 bp, Homo sapiens
gatggggaaacaagt

SEQ ID NO: 1898067 - DNA, 15 bp, Homo sapiens
atggggaaacaagtc

SEQ ID NO: 1898068 - DNA, 15 bp, Homo sapiens
tggggaaacaagtct

SEQ ID NO: 1898069 - DNA, 15 bp, Homo sapiens
ggggaaacaagtctg

SEQ ID NO: 1898070 - DNA, 15 bp, Homo sapiens
gggaaacaagtctgg

SEQ ID NO: 1898071 - DNA, 15 bp, Homo sapiens
ggaaacaagtctgga

SEQ ID NO: 1898072 - DNA, 15 bp, Homo sapiens
gaaacaagtctggaa

SEQ ID NO: 1898073 - DNA, 15 bp, Homo sapiens
aaacaagtctggaat

SEQ ID NO: 1898074 - DNA, 15 bp, Homo sapiens
aacaagtctggaatt

SEQ ID NO: 1898075 - DNA, 15 bp, Homo sapiens
acaagtctggaattt

SEQ ID NO: 1898076 - DNA, 15 bp, Homo sapiens
caagtctggaattta

SEQ ID NO: 1898077 - DNA, 15 bp, Homo sapiens
aagtctggaatttaa

SEQ ID NO: 1898078 - DNA, 15 bp, Homo sapiens
agtctggaatttaaa

SEQ ID NO: 1898079 - DNA, 15 bp, Homo sapiens
gtctggaatttaaaa

SEQ ID NO: 1898080 - DNA, 15 bp, Homo sapiens
tctggaatttaaaaa

SEQ ID NO: 1898081 - DNA, 15 bp, Homo sapiens
ctggaatttaaaaaa

SEQ ID NO: 1898082 - DNA, 15 bp, Homo sapiens
tggaatttaaaaaaa

SEQ ID NO: 1898083 - DNA, 15 bp, Homo sapiens
ggaatttaaaaaaaa

SEQ ID NO: 1898084 - DNA, 15 bp, Homo sapiens
gaatttaaaaaaaaa

SEQ ID NO: 1898085 - DNA, 15 bp, Homo sapiens
tttaaaaaaaaatgt

SEQ ID NO: 1898086 - DNA, 15 bp, Homo sapiens
ttaaaaaaaaatgtt

SEQ ID NO: 1898087 - DNA, 15 bp, Homo sapiens
taaaaaaaaatgttt

SEQ ID NO: 1898088 - DNA, 15 bp, Homo sapiens
aaaaaaaatgtttta

SEQ ID NO: 1898089 - DNA, 15 bp, Homo sapiens
aaaaaaatgttttag

SEQ ID NO: 1898090 - DNA, 15 bp, Homo sapiens
aaaaaatgttttaga

SEQ ID NO: 1898091 - DNA, 15 bp, Homo sapiens
aaaaatgttttagag

SEQ ID NO: 1898092 - DNA, 15 bp, Homo sapiens
aaaatgttttagagg

SEQ ID NO: 1898093 - DNA, 15 bp, Homo sapiens
aaatgttttagaggt

SEQ ID NO: 1898094 - DNA, 15 bp, Homo sapiens
aatgttttagaggtt

SEQ ID NO: 1898095 - DNA, 15 bp, Homo sapiens
atgttttagaggttg

SEQ ID NO: 1898096 - DNA, 15 bp, Homo sapiens
tgttttagaggttgg

SEQ ID NO: 1898097 - DNA, 15 bp, Homo sapiens
gttttagaggttgga

SEQ ID NO: 1898098 - DNA, 15 bp, Homo sapiens
ttttagaggttggag

SEQ ID NO: 1898099 - DNA, 15 bp, Homo sapiens
tttagaggttggagc

SEQ ID NO: 1898100 - DNA, 15 bp, Homo sapiens
ttagaggttggagcc

SEQ ID NO: 1898101 - DNA, 15 bp, Homo sapiens
tagaggttggagcct

SEQ ID NO: 1898102 - DNA, 15 bp, Homo sapiens
agaggttggagcctt

SEQ ID NO: 1898103 - DNA, 15 bp, Homo sapiens
gaggttggagccttg

SEQ ID NO: 1898104 - DNA, 15 bp, Homo sapiens
aggttggagccttga

SEQ ID NO: 1898105 - DNA, 15 bp, Homo sapiens
ggttggagccttgat

SEQ ID NO: 1898106 - DNA, 15 bp, Homo sapiens
gttggagccttgatt

SEQ ID NO: 1898107 - DNA, 15 bp, Homo sapiens
ttggagccttgattt

SEQ ID NO: 1898108 - DNA, 15 bp, Homo sapiens
tggagccttgatttt

SEQ ID NO: 1898109 - DNA, 15 bp, Homo sapiens
ggagccttgatttta

SEQ ID NO: 1898110 - DNA, 15 bp, Homo sapiens
gagccttgattttag

SEQ ID NO: 1898111 - DNA, 15 bp, Homo sapiens
agccttgattttagt

SEQ ID NO: 1898112 - DNA, 15 bp, Homo sapiens
gccttgattttagtc

SEQ ID NO: 1898113 - DNA, 15 bp, Homo sapiens
ccttgattttagtct

SEQ ID NO: 1898114 - DNA, 15 bp, Homo sapiens
cttgattttagtctc

SEQ ID NO: 1898115 - DNA, 15 bp, Homo sapiens
ttgattttagtctct

SEQ ID NO: 1898116 - DNA, 15 bp, Homo sapiens
tgattttagtctcta

SEQ ID NO: 1898117 - DNA, 15 bp, Homo sapiens
gattttagtctctat

SEQ ID NO: 1898118 - DNA, 15 bp, Homo sapiens
attttagtctctata

SEQ ID NO: 1898119 - DNA, 15 bp, Homo sapiens
ttttagtctctatat

SEQ ID NO: 1898120 - DNA, 15 bp, Homo sapiens
tttagtctctatatt

SEQ ID NO: 1898121 - DNA, 15 bp, Homo sapiens
ttagtctctatatta

SEQ ID NO: 1898122 - DNA, 15 bp, Homo sapiens
tagtctctatattag

SEQ ID NO: 1898123 - DNA, 15 bp, Homo sapiens
agtctctatattagc

SEQ ID NO: 1898124 - DNA, 15 bp, Homo sapiens
gtctctatattagca

SEQ ID NO: 1898125 - DNA, 15 bp, Homo sapiens
tctctatattagcac

SEQ ID NO: 1898126 - DNA, 15 bp, Homo sapiens
ctctatattagcaca

SEQ ID NO: 1898127 - DNA, 15 bp, Homo sapiens
tctatattagcacat

SEQ ID NO: 1898128 - DNA, 15 bp, Homo sapiens
ctatattagcacatc

SEQ ID NO: 1898129 - DNA, 15 bp, Homo sapiens
tatattagcacatcc

SEQ ID NO: 1898130 - DNA, 15 bp, Homo sapiens
atattagcacatcca

SEQ ID NO: 1898131 - DNA, 15 bp, Homo sapiens
tattagcacatccat

SEQ ID NO: 1898132 - DNA, 15 bp, Homo sapiens
attagcacatccatc

SEQ ID NO: 1898133 - DNA, 15 bp, Homo sapiens
ttagcacatccatca

SEQ ID NO: 1898134 - DNA, 15 bp, Homo sapiens
tagcacatccatcac

SEQ ID NO: 1898135 - DNA, 15 bp, Homo sapiens
agcacatccatcaca

SEQ ID NO: 1898136 - DNA, 15 bp, Homo sapiens
gcacatccatcacaa

SEQ ID NO: 1898137 - DNA, 15 bp, Homo sapiens
cacatccatcacaaa

SEQ ID NO: 1898138 - DNA, 15 bp, Homo sapiens
acatccatcacaaag

SEQ ID NO: 1898139 - DNA, 15 bp, Homo sapiens
catccatcacaaaga

SEQ ID NO: 1898140 - DNA, 15 bp, Homo sapiens
atccatcacaaagaa

SEQ ID NO: 1898141 - DNA, 15 bp, Homo sapiens
tccatcacaaagaac

SEQ ID NO: 1898142 - DNA, 15 bp, Homo sapiens
ccatcacaaagaacc

SEQ ID NO: 1898143 - DNA, 15 bp, Homo sapiens
catcacaaagaacca

SEQ ID NO: 1898144 - DNA, 15 bp, Homo sapiens
atcacaaagaaccat

SEQ ID NO: 1898145 - DNA, 15 bp, Homo sapiens
tcacaaagaaccatt

SEQ ID NO: 1898146 - DNA, 15 bp, Homo sapiens
cacaaagaaccatta

SEQ ID NO: 1898147 - DNA, 15 bp, Homo sapiens
acaaagaaccattag

SEQ ID NO: 1898148 - DNA, 15 bp, Homo sapiens
caaagaaccattagt

SEQ ID NO: 1898149 - DNA, 15 bp, Homo sapiens
aaagaaccattagta

SEQ ID NO: 1898150 - DNA, 15 bp, Homo sapiens
aagaaccattagtaa

SEQ ID NO: 1898151 - DNA, 15 bp, Homo sapiens
agaaccattagtaaa

SEQ ID NO: 1898152 - DNA, 15 bp, Homo sapiens
gaaccattagtaaat

SEQ ID NO: 1898153 - DNA, 15 bp, Homo sapiens
aaccattagtaaatt

SEQ ID NO: 1898154 - DNA, 15 bp, Homo sapiens
accattagtaaattc

SEQ ID NO: 1898155 - DNA, 15 bp, Homo sapiens
ccattagtaaattca

SEQ ID NO: 1898156 - DNA, 15 bp, Homo sapiens
cattagtaaattcat

SEQ ID NO: 1898157 - DNA, 15 bp, Homo sapiens
attagtaaattcatg

SEQ ID NO: 1898158 - DNA, 15 bp, Homo sapiens
ttagtaaattcatga

SEQ ID NO: 1898159 - DNA, 15 bp, Homo sapiens
tagtaaattcatgaa

SEQ ID NO: 1898160 - DNA, 15 bp, Homo sapiens
agtaaattcatgaat

SEQ ID NO: 1898161 - DNA, 15 bp, Homo sapiens
gtaaattcatgaatc

SEQ ID NO: 1898162 - DNA, 15 bp, Homo sapiens
taaattcatgaatct

SEQ ID NO: 1898163 - DNA, 15 bp, Homo sapiens
aaattcatgaatctt

SEQ ID NO: 1898164 - DNA, 15 bp, Homo sapiens
aattcatgaatcttt

SEQ ID NO: 1898165 - DNA, 15 bp, Homo sapiens
attcatgaatctttt

SEQ ID NO: 1898166 - DNA, 15 bp, Homo sapiens
ttcatgaatcttttg

SEQ ID NO: 1898167 - DNA, 15 bp, Homo sapiens
tcatgaatcttttgt

SEQ ID NO: 1898168 - DNA, 15 bp, Homo sapiens
catgaatcttttgtt

SEQ ID NO: 1898169 - DNA, 15 bp, Homo sapiens
atgaatcttttgttt

SEQ ID NO: 1898170 - DNA, 15 bp, Homo sapiens
tgaatcttttgtttt

SEQ ID NO: 1898171 - DNA, 15 bp, Homo sapiens
gaatcttttgttttt

SEQ ID NO: 1898172 - DNA, 15 bp, Homo sapiens
aatcttttgtttttt

SEQ ID NO: 1898173 - DNA, 15 bp, Homo sapiens
atcttttgtttttta

SEQ ID NO: 1898174 - DNA, 15 bp, Homo sapiens
tcttttgttttttat

SEQ ID NO: 1898175 - DNA, 15 bp, Homo sapiens
cttttgttttttatg

SEQ ID NO: 1898176 - DNA, 15 bp, Homo sapiens
ttttgttttttatgt

SEQ ID NO: 1898177 - DNA, 15 bp, Homo sapiens
tttgttttttatgta

SEQ ID NO: 1898178 - DNA, 15 bp, Homo sapiens
ttgttttttatgtag

SEQ ID NO: 1898179 - DNA, 15 bp, Homo sapiens
tgttttttatgtagt

SEQ ID NO: 1898180 - DNA, 15 bp, Homo sapiens
gttttttatgtagtt

SEQ ID NO: 1898181 - DNA, 15 bp, Homo sapiens
ttttttatgtagttc

SEQ ID NO: 1898182 - DNA, 15 bp, Homo sapiens
tttttatgtagttca

SEQ ID NO: 1898183 - DNA, 15 bp, Homo sapiens
ttttatgtagttcat

SEQ ID NO: 1898184 - DNA, 15 bp, Homo sapiens
tttatgtagttcatt

SEQ ID NO: 1898185 - DNA, 15 bp, Homo sapiens
ttatgtagttcattt

SEQ ID NO: 1898186 - DNA, 15 bp, Homo sapiens
tatgtagttcatttg

SEQ ID NO: 1898187 - DNA, 15 bp, Homo sapiens
atgtagttcatttga

SEQ ID NO: 1898188 - DNA, 15 bp, Homo sapiens
tgtagttcatttgag

SEQ ID NO: 1898189 - DNA, 15 bp, Homo sapiens
gtagttcatttgaga

SEQ ID NO: 1898190 - DNA, 15 bp, Homo sapiens
tagttcatttgagaa

SEQ ID NO: 1898191 - DNA, 15 bp, Homo sapiens
agttcatttgagaag

SEQ ID NO: 1898192 - DNA, 15 bp, Homo sapiens
gttcatttgagaaga

SEQ ID NO: 1898193 - DNA, 15 bp, Homo sapiens
ttcatttgagaagaa

SEQ ID NO: 1898194 - DNA, 15 bp, Homo sapiens
tcatttgagaagaat

SEQ ID NO: 1898195 - DNA, 15 bp, Homo sapiens
catttgagaagaata

SEQ ID NO: 1898196 - DNA, 15 bp, Homo sapiens
atttgagaagaataa

SEQ ID NO: 1898197 - DNA, 15 bp, Homo sapiens
tttgagaagaataat

SEQ ID NO: 1898198 - DNA, 15 bp, Homo sapiens
ttgagaagaataatc

SEQ ID NO: 1898199 - DNA, 15 bp, Homo sapiens
tgagaagaataatca

SEQ ID NO: 1898200 - DNA, 15 bp, Homo sapiens
gagaagaataatcac

SEQ ID NO: 1898201 - DNA, 15 bp, Homo sapiens
agaagaataatcact

SEQ ID NO: 1898202 - DNA, 15 bp, Homo sapiens
gaagaataatcactt

SEQ ID NO: 1898203 - DNA, 15 bp, Homo sapiens
aagaataatcactta

SEQ ID NO: 1898204 - DNA, 15 bp, Homo sapiens
agaataatcacttag

SEQ ID NO: 1898205 - DNA, 15 bp, Homo sapiens
gaataatcacttaga

SEQ ID NO: 1898206 - DNA, 15 bp, Homo sapiens
aataatcacttagaa

SEQ ID NO: 1898207 - DNA, 15 bp, Homo sapiens
ataatcacttagaaa

SEQ ID NO: 1898208 - DNA, 15 bp, Homo sapiens
taatcacttagaaat

SEQ ID NO: 1898209 - DNA, 15 bp, Homo sapiens
aatcacttagaaata

SEQ ID NO: 1898210 - DNA, 15 bp, Homo sapiens
atcacttagaaatat

SEQ ID NO: 1898211 - DNA, 15 bp, Homo sapiens
tcacttagaaatatc

SEQ ID NO: 1898212 - DNA, 15 bp, Homo sapiens
cacttagaaatatcc

SEQ ID NO: 1898213 - DNA, 15 bp, Homo sapiens
acttagaaatatcca

SEQ ID NO: 1898214 - DNA, 15 bp, Homo sapiens
cttagaaatatccac

SEQ ID NO: 1898215 - DNA, 15 bp, Homo sapiens
ttagaaatatccaca

SEQ ID NO: 1898216 - DNA, 15 bp, Homo sapiens
tagaaatatccacag

SEQ ID NO: 1898217 - DNA, 15 bp, Homo sapiens
agaaatatccacagt

SEQ ID NO: 1898218 - DNA, 15 bp, Homo sapiens
gaaatatccacagtg

SEQ ID NO: 1898219 - DNA, 15 bp, Homo sapiens
aaatatccacagtgc

SEQ ID NO: 1898220 - DNA, 15 bp, Homo sapiens
aatatccacagtgcc

SEQ ID NO: 1898221 - DNA, 15 bp, Homo sapiens
atatccacagtgcca

SEQ ID NO: 1898222 - DNA, 15 bp, Homo sapiens
tatccacagtgccag

SEQ ID NO: 1898223 - DNA, 15 bp, Homo sapiens
atccacagtgccagg

SEQ ID NO: 1898224 - DNA, 15 bp, Homo sapiens
tccacagtgccaggc

SEQ ID NO: 1898225 - DNA, 15 bp, Homo sapiens
ccacagtgccaggca

SEQ ID NO: 1898226 - DNA, 15 bp, Homo sapiens
cacagtgccaggcat

SEQ ID NO: 1898227 - DNA, 15 bp, Homo sapiens
acagtgccaggcatg

SEQ ID NO: 1898228 - DNA, 15 bp, Homo sapiens
cagtgccaggcatgg

SEQ ID NO: 1898229 - DNA, 15 bp, Homo sapiens
agtgccaggcatggt

SEQ ID NO: 1898230 - DNA, 15 bp, Homo sapiens
gtgccaggcatggtg

SEQ ID NO: 1898231 - DNA, 15 bp, Homo sapiens
tgccaggcatggtgg

SEQ ID NO: 1898232 - DNA, 15 bp, Homo sapiens
ggcatggtggtgcac

SEQ ID NO: 1898233 - DNA, 15 bp, Homo sapiens
gcatggtggtgcaca

SEQ ID NO: 1898234 - DNA, 15 bp, Homo sapiens
catggtggtgcacac

SEQ ID NO: 1898235 - DNA, 15 bp, Homo sapiens
atggtggtgcacacc

SEQ ID NO: 1898236 - DNA, 15 bp, Homo sapiens
ggtggtgcacacctc

SEQ ID NO: 1898237 - DNA, 15 bp, Homo sapiens
gtggtgcacacctct

SEQ ID NO: 1898238 - DNA, 15 bp, Homo sapiens
tggtgcacacctctg

SEQ ID NO: 1898239 - DNA, 15 bp, Homo sapiens
ggtgcacacctctga

SEQ ID NO: 1898240 - DNA, 15 bp, Homo sapiens
gtgcacacctctgat

SEQ ID NO: 1898241 - DNA, 15 bp, Homo sapiens
tgcacacctctgatc

SEQ ID NO: 1898242 - DNA, 15 bp, Homo sapiens
gcacacctctgatcc

SEQ ID NO: 1898243 - DNA, 15 bp, Homo sapiens
cacacctctgatccc

SEQ ID NO: 1898244 - DNA, 15 bp, Homo sapiens
acacctctgatccca

SEQ ID NO: 1898245 - DNA, 15 bp, Homo sapiens
cacctctgatcccag

SEQ ID NO: 1898246 - DNA, 15 bp, Homo sapiens
acctctgatcccagc

SEQ ID NO: 1898247 - DNA, 15 bp, Homo sapiens
cctctgatcccagct

SEQ ID NO: 1898248 - DNA, 15 bp, Homo sapiens
ctctgatcccagcta

SEQ ID NO: 1898249 - DNA, 15 bp, Homo sapiens
tctgatcccagctaa

SEQ ID NO: 1898250 - DNA, 15 bp, Homo sapiens
ctgatcccagctaat

SEQ ID NO: 1898251 - DNA, 15 bp, Homo sapiens
tgatcccagctaatt

SEQ ID NO: 1898252 - DNA, 15 bp, Homo sapiens
gatcccagctaattg

SEQ ID NO: 1898253 - DNA, 15 bp, Homo sapiens
atcccagctaattga

SEQ ID NO: 1898254 - DNA, 15 bp, Homo sapiens
tcccagctaattgaa

SEQ ID NO: 1898255 - DNA, 15 bp, Homo sapiens
cccagctaattgaag

SEQ ID NO: 1898256 - DNA, 15 bp, Homo sapiens
ccagctaattgaagg

SEQ ID NO: 1898257 - DNA, 15 bp, Homo sapiens
cagctaattgaaggc

SEQ ID NO: 1898258 - DNA, 15 bp, Homo sapiens
agctaattgaaggct

SEQ ID NO: 1898259 - DNA, 15 bp, Homo sapiens
gctaattgaaggctg

SEQ ID NO: 1898260 - DNA, 15 bp, Homo sapiens
ctaattgaaggctga

SEQ ID NO: 1898261 - DNA, 15 bp, Homo sapiens
taattgaaggctgag

SEQ ID NO: 1898262 - DNA, 15 bp, Homo sapiens
aattgaaggctgagg

SEQ ID NO: 1898263 - DNA, 15 bp, Homo sapiens
attgaaggctgaggt

SEQ ID NO: 1898264 - DNA, 15 bp, Homo sapiens
ttgaaggctgaggtg

SEQ ID NO: 1898265 - DNA, 15 bp, Homo sapiens
tgaaggctgaggtgg

SEQ ID NO: 1898266 - DNA, 15 bp, Homo sapiens
gaggtgggaggattc

SEQ ID NO: 1898267 - DNA, 15 bp, Homo sapiens
aggtgggaggattcc

SEQ ID NO: 1898268 - DNA, 15 bp, Homo sapiens
ggtgggaggattcct

SEQ ID NO: 1898269 - DNA, 15 bp, Homo sapiens
gtgggaggattcctt

SEQ ID NO: 1898270 - DNA, 15 bp, Homo sapiens
tgggaggattccttg

SEQ ID NO: 1898271 - DNA, 15 bp, Homo sapiens
gggaggattccttga

SEQ ID NO: 1898272 - DNA, 15 bp, Homo sapiens
ggaggattccttgag

SEQ ID NO: 1898273 - DNA, 15 bp, Homo sapiens
gaggattccttgagt

SEQ ID NO: 1898274 - DNA, 15 bp, Homo sapiens
aggattccttgagtc

SEQ ID NO: 1898275 - DNA, 15 bp, Homo sapiens
ggattccttgagtcc

SEQ ID NO: 1898276 - DNA, 15 bp, Homo sapiens
gattccttgagtcca

SEQ ID NO: 1898277 - DNA, 15 bp, Homo sapiens
attccttgagtccag

SEQ ID NO: 1898278 - DNA, 15 bp, Homo sapiens
ttccttgagtccagg

SEQ ID NO: 1898279 - DNA, 15 bp, Homo sapiens
tccttgagtccagga

SEQ ID NO: 1898280 - DNA, 15 bp, Homo sapiens
ccttgagtccaggag

SEQ ID NO: 1898281 - DNA, 15 bp, Homo sapiens
tgagtccaggagttg

SEQ ID NO: 1898282 - DNA, 15 bp, Homo sapiens
gagtccaggagttga

SEQ ID NO: 1898283 - DNA, 15 bp, Homo sapiens
agtccaggagttgag

SEQ ID NO: 1898284 - DNA, 15 bp, Homo sapiens
gtccaggagttgagt

SEQ ID NO: 1898285 - DNA, 15 bp, Homo sapiens
tccaggagttgagtc

SEQ ID NO: 1898286 - DNA, 15 bp, Homo sapiens
ccaggagttgagtct

SEQ ID NO: 1898287 - DNA, 15 bp, Homo sapiens
caggagttgagtctg

SEQ ID NO: 1898288 - DNA, 15 bp, Homo sapiens
aggagttgagtctgg

SEQ ID NO: 1898289 - DNA, 15 bp, Homo sapiens
ggagttgagtctggt

SEQ ID NO: 1898290 - DNA, 15 bp, Homo sapiens
gagttgagtctggtc

SEQ ID NO: 1898291 - DNA, 15 bp, Homo sapiens
agttgagtctggtct

SEQ ID NO: 1898292 - DNA, 15 bp, Homo sapiens
gttgagtctggtctg

SEQ ID NO: 1898293 - DNA, 15 bp, Homo sapiens
ttgagtctggtctgg

SEQ ID NO: 1898294 - DNA, 15 bp, Homo sapiens
tgagtctggtctggg

SEQ ID NO: 1898295 - DNA, 15 bp, Homo sapiens
gagtctggtctgggc

SEQ ID NO: 1898296 - DNA, 15 bp, Homo sapiens
agtctggtctgggca

SEQ ID NO: 1898297 - DNA, 15 bp, Homo sapiens
gtctggtctgggcaa

SEQ ID NO: 1898298 - DNA, 15 bp, Homo sapiens
tctggtctgggcaac

SEQ ID NO: 1898299 - DNA, 15 bp, Homo sapiens
ctggtctgggcaaca

SEQ ID NO: 1898300 - DNA, 15 bp, Homo sapiens
tggtctgggcaacat

SEQ ID NO: 1898301 - DNA, 15 bp, Homo sapiens
ggtctgggcaacatg

SEQ ID NO: 1898302 - DNA, 15 bp, Homo sapiens
tctgggcaacatggt

SEQ ID NO: 1898303 - DNA, 15 bp, Homo sapiens
ctgggcaacatggtg

SEQ ID NO: 1898304 - DNA, 15 bp, Homo sapiens
tgggcaacatggtga

SEQ ID NO: 1898305 - DNA, 15 bp, Homo sapiens
gggcaacatggtgag

SEQ ID NO: 1898306 - DNA, 15 bp, Homo sapiens
ggcaacatggtgaga

SEQ ID NO: 1898307 - DNA, 15 bp, Homo sapiens
gcaacatggtgagag

SEQ ID NO: 1898308 - DNA, 15 bp, Homo sapiens
caacatggtgagagg

SEQ ID NO: 1898309 - DNA, 15 bp, Homo sapiens
aacatggtgagaggc

SEQ ID NO: 1898310 - DNA, 15 bp, Homo sapiens
acatggtgagaggcc

SEQ ID NO: 1898311 - DNA, 15 bp, Homo sapiens
catggtgagaggcca

SEQ ID NO: 1898312 - DNA, 15 bp, Homo sapiens
atggtgagaggccag

SEQ ID NO: 1898313 - DNA, 15 bp, Homo sapiens
tggtgagaggccagg

SEQ ID NO: 1898314 - DNA, 15 bp, Homo sapiens
ggtgagaggccagga

SEQ ID NO: 1898315 - DNA, 15 bp, Homo sapiens
gtgagaggccaggaa

SEQ ID NO: 1898316 - DNA, 15 bp, Homo sapiens
tgagaggccaggaat

SEQ ID NO: 1898317 - DNA, 15 bp, Homo sapiens
gagaggccaggaatt

SEQ ID NO: 1898318 - DNA, 15 bp, Homo sapiens
agaggccaggaattg

SEQ ID NO: 1898319 - DNA, 15 bp, Homo sapiens
gaggccaggaattgg

SEQ ID NO: 1898320 - DNA, 15 bp, Homo sapiens
aggccaggaattggg

SEQ ID NO: 1898321 - DNA, 15 bp, Homo sapiens
ggccaggaattgggt

SEQ ID NO: 1898322 - DNA, 15 bp, Homo sapiens
gccaggaattgggtc

SEQ ID NO: 1898323 - DNA, 15 bp, Homo sapiens
ccaggaattgggtct

SEQ ID NO: 1898324 - DNA, 15 bp, Homo sapiens
caggaattgggtcta

SEQ ID NO: 1898325 - DNA, 15 bp, Homo sapiens
aggaattgggtctag

SEQ ID NO: 1898326 - DNA, 15 bp, Homo sapiens
ggaattgggtctaga

SEQ ID NO: 1898327 - DNA, 15 bp, Homo sapiens
gaattgggtctagag

SEQ ID NO: 1898328 - DNA, 15 bp, Homo sapiens
aattgggtctagagt

SEQ ID NO: 1898329 - DNA, 15 bp, Homo sapiens
attgggtctagagtc

SEQ ID NO: 1898330 - DNA, 15 bp, Homo sapiens
ttgggtctagagtct

SEQ ID NO: 1898331 - DNA, 15 bp, Homo sapiens
tgggtctagagtcta

SEQ ID NO: 1898332 - DNA, 15 bp, Homo sapiens
gggtctagagtctag

SEQ ID NO: 1898333 - DNA, 15 bp, Homo sapiens
ggtctagagtctagt

SEQ ID NO: 1898334 - DNA, 15 bp, Homo sapiens
gtctagagtctagtc

SEQ ID NO: 1898335 - DNA, 15 bp, Homo sapiens
tctagagtctagtct

SEQ ID NO: 1898336 - DNA, 15 bp, Homo sapiens
ctagagtctagtcta

SEQ ID NO: 1898337 - DNA, 15 bp, Homo sapiens
tagagtctagtctaa

SEQ ID NO: 1898338 - DNA, 15 bp, Homo sapiens
agagtctagtctaag

SEQ ID NO: 1898339 - DNA, 15 bp, Homo sapiens
gagtctagtctaagc

SEQ ID NO: 1898340 - DNA, 15 bp, Homo sapiens
agtctagtctaagca

SEQ ID NO: 1898341 - DNA, 15 bp, Homo sapiens
gtctagtctaagcac

SEQ ID NO: 1898342 - DNA, 15 bp, Homo sapiens
tctagtctaagcacc

SEQ ID NO: 1898343 - DNA, 15 bp, Homo sapiens
ctagtctaagcacca

SEQ ID NO: 1898344 - DNA, 15 bp, Homo sapiens
tagtctaagcaccat

SEQ ID NO: 1898345 - DNA, 15 bp, Homo sapiens
agtctaagcaccata

SEQ ID NO: 1898346 - DNA, 15 bp, Homo sapiens
gtctaagcaccataa

SEQ ID NO: 1898347 - DNA, 15 bp, Homo sapiens
tctaagcaccataat

SEQ ID NO: 1898348 - DNA, 15 bp, Homo sapiens
ctaagcaccataatg

SEQ ID NO: 1898349 - DNA, 15 bp, Homo sapiens
taagcaccataatga

SEQ ID NO: 1898350 - DNA, 15 bp, Homo sapiens
aagcaccataatgag

SEQ ID NO: 1898351 - DNA, 15 bp, Homo sapiens
agcaccataatgaga

SEQ ID NO: 1898352 - DNA, 15 bp, Homo sapiens
gcaccataatgagaa

SEQ ID NO: 1898353 - DNA, 15 bp, Homo sapiens
caccataatgagaac

SEQ ID NO: 1898354 - DNA, 15 bp, Homo sapiens
accataatgagaacc

SEQ ID NO: 1898355 - DNA, 15 bp, Homo sapiens
ccataatgagaaccc

SEQ ID NO: 1898356 - DNA, 15 bp, Homo sapiens
cataatgagaaccca

SEQ ID NO: 1898357 - DNA, 15 bp, Homo sapiens
ataatgagaacccat

SEQ ID NO: 1898358 - DNA, 15 bp, Homo sapiens
taatgagaacccatc

SEQ ID NO: 1898359 - DNA, 15 bp, Homo sapiens
aatgagaacccatct

SEQ ID NO: 1898360 - DNA, 15 bp, Homo sapiens
tgagaacccatcttt

SEQ ID NO: 1898361 - DNA, 15 bp, Homo sapiens
gagaacccatcttta

SEQ ID NO: 1898362 - DNA, 15 bp, Homo sapiens
agaacccatctttaa

SEQ ID NO: 1898363 - DNA, 15 bp, Homo sapiens
gaacccatctttaag

SEQ ID NO: 1898364 - DNA, 15 bp, Homo sapiens
aacccatctttaaga

SEQ ID NO: 1898365 - DNA, 15 bp, Homo sapiens
acccatctttaagaa

SEQ ID NO: 1898366 - DNA, 15 bp, Homo sapiens
cccatctttaagaaa

SEQ ID NO: 1898367 - DNA, 15 bp, Homo sapiens
ccatctttaagaaag

SEQ ID NO: 1898368 - DNA, 15 bp, Homo sapiens
catctttaagaaaga

SEQ ID NO: 1898369 - DNA, 15 bp, Homo sapiens
atctttaagaaagaa

SEQ ID NO: 1898370 - DNA, 15 bp, Homo sapiens
tctttaagaaagaaa

SEQ ID NO: 1898371 - DNA, 15 bp, Homo sapiens
ctttaagaaagaaag

SEQ ID NO: 1898372 - DNA, 15 bp, Homo sapiens
tttaagaaagaaaga

SEQ ID NO: 1898373 - DNA, 15 bp, Homo sapiens
ttaagaaagaaagaa

SEQ ID NO: 1898374 - DNA, 15 bp, Homo sapiens
taagaaagaaagaaa

SEQ ID NO: 1898375 - DNA, 15 bp, Homo sapiens
agaaagaaagaaagg

SEQ ID NO: 1898376 - DNA, 15 bp, Homo sapiens
gaaagaaagaaagga

SEQ ID NO: 1898377 - DNA, 15 bp, Homo sapiens
aaagaaagaaaggaa

SEQ ID NO: 1898378 - DNA, 15 bp, Homo sapiens
aagaaaggaaaggag

SEQ ID NO: 1898379 - DNA, 15 bp, Homo sapiens
agaaaggaaaggagg

SEQ ID NO: 1898380 - DNA, 15 bp, Homo sapiens
gaaaggaaaggagga

SEQ ID NO: 1898381 - DNA, 15 bp, Homo sapiens
aaaggaaaggaggaa

SEQ ID NO: 1898382 - DNA, 15 bp, Homo sapiens
aaggaaaggaggaag

SEQ ID NO: 1898383 - DNA, 15 bp, Homo sapiens
aggaaaggaggaaga

SEQ ID NO: 1898384 - DNA, 15 bp, Homo sapiens
ggaaaggaggaagaa

SEQ ID NO: 1898385 - DNA, 15 bp, Homo sapiens
gaaaggaggaagaaa

SEQ ID NO: 1898386 - DNA, 15 bp, Homo sapiens
aaaggaggaagaaag

SEQ ID NO: 1898387 - DNA, 15 bp, Homo sapiens
aaggaggaagaaagg

SEQ ID NO: 1898388 - DNA, 15 bp, Homo sapiens
aggaggaagaaagga

SEQ ID NO: 1898389 - DNA, 15 bp, Homo sapiens
ggaggaagaaaggaa

SEQ ID NO: 1898390 - DNA, 15 bp, Homo sapiens
gaggaagaaaggaaa

SEQ ID NO: 1898391 - DNA, 15 bp, Homo sapiens
gaaaggaaagaaaaa

SEQ ID NO: 1898392 - DNA, 15 bp, Homo sapiens
aaaggaaagaaaaag

SEQ ID NO: 1898393 - DNA, 15 bp, Homo sapiens
aggaaagaaaaagaa

SEQ ID NO: 1898394 - DNA, 15 bp, Homo sapiens
ggaaagaaaaagaaa

SEQ ID NO: 1898395 - DNA, 15 bp, Homo sapiens
gaaagaaaaagaaat

SEQ ID NO: 1898396 - DNA, 15 bp, Homo sapiens
aaagaaaaagaaata

SEQ ID NO: 1898397 - DNA, 15 bp, Homo sapiens
aagaaaaagaaatac

SEQ ID NO: 1898398 - DNA, 15 bp, Homo sapiens
agaaaaagaaatacc

SEQ ID NO: 1898399 - DNA, 15 bp, Homo sapiens
gaaaaagaaataccc

SEQ ID NO: 1898400 - DNA, 15 bp, Homo sapiens
aaaaagaaataccca

SEQ ID NO: 1898401 - DNA, 15 bp, Homo sapiens
aaaagaaatacccac

SEQ ID NO: 1898402 - DNA, 15 bp, Homo sapiens
aaagaaatacccaca

SEQ ID NO: 1898403 - DNA, 15 bp, Homo sapiens
aagaaatacccacag

SEQ ID NO: 1898404 - DNA, 15 bp, Homo sapiens
agaaatacccacagc

SEQ ID NO: 1898405 - DNA, 15 bp, Homo sapiens
gaaatacccacagca

SEQ ID NO: 1898406 - DNA, 15 bp, Homo sapiens
aaatacccacagcac

SEQ ID NO: 1898407 - DNA, 15 bp, Homo sapiens
aatacccacagcaca

SEQ ID NO: 1898408 - DNA, 15 bp, Homo sapiens
atacccacagcacag

SEQ ID NO: 1898409 - DNA, 15 bp, Homo sapiens
tacccacagcacagt

SEQ ID NO: 1898410 - DNA, 15 bp, Homo sapiens
acccacagcacagtt

SEQ ID NO: 1898411 - DNA, 15 bp, Homo sapiens
cccacagcacagtta

SEQ ID NO: 1898412 - DNA, 15 bp, Homo sapiens
ccacagcacagttat

SEQ ID NO: 1898413 - DNA, 15 bp, Homo sapiens
cacagcacagttatg

SEQ ID NO: 1898414 - DNA, 15 bp, Homo sapiens
acagcacagttatga

SEQ ID NO: 1898415 - DNA, 15 bp, Homo sapiens
cagcacagttatgaa

SEQ ID NO: 1898416 - DNA, 15 bp, Homo sapiens
agcacagttatgaat

SEQ ID NO: 1898417 - DNA, 15 bp, Homo sapiens
gcacagttatgaatt

SEQ ID NO: 1898418 - DNA, 15 bp, Homo sapiens
cacagttatgaatta

SEQ ID NO: 1898419 - DNA, 15 bp, Homo sapiens
acagttatgaattaa

SEQ ID NO: 1898420 - DNA, 15 bp, Homo sapiens
cagttatgaattaac

SEQ ID NO: 1898421 - DNA, 15 bp, Homo sapiens
agttatgaattaacc

SEQ ID NO: 1898422 - DNA, 15 bp, Homo sapiens
gttatgaattaaccc

SEQ ID NO: 1898423 - DNA, 15 bp, Homo sapiens
ttatgaattaaccca

SEQ ID NO: 1898424 - DNA, 15 bp, Homo sapiens
tatgaattaacccac

SEQ ID NO: 1898425 - DNA, 15 bp, Homo sapiens
atgaattaacccaca

SEQ ID NO: 1898426 - DNA, 15 bp, Homo sapiens
tgaattaacccacaa

SEQ ID NO: 1898427 - DNA, 15 bp, Homo sapiens
gaattaacccacaaa

SEQ ID NO: 1898428 - DNA, 15 bp, Homo sapiens
aattaacccacaaag

SEQ ID NO: 1898429 - DNA, 15 bp, Homo sapiens
attaacccacaaagg

SEQ ID NO: 1898430 - DNA, 15 bp, Homo sapiens
ttaacccacaaagga

SEQ ID NO: 1898431 - DNA, 15 bp, Homo sapiens
taacccacaaaggac

SEQ ID NO: 1898432 - DNA, 15 bp, Homo sapiens
aacccacaaaggact

SEQ ID NO: 1898433 - DNA, 15 bp, Homo sapiens
acccacaaaggactt

SEQ ID NO: 1898434 - DNA, 15 bp, Homo sapiens
cccacaaaggacttg

SEQ ID NO: 1898435 - DNA, 15 bp, Homo sapiens
ccacaaaggacttgt

SEQ ID NO: 1898436 - DNA, 15 bp, Homo sapiens
cacaaaggacttgtg

SEQ ID NO: 1898437 - DNA, 15 bp, Homo sapiens
acaaaggacttgtga

SEQ ID NO: 1898438 - DNA, 15 bp, Homo sapiens
caaaggacttgtgag

SEQ ID NO: 1898439 - DNA, 15 bp, Homo sapiens
aaaggacttgtgagg

SEQ ID NO: 1898440 - DNA, 15 bp, Homo sapiens
aaggacttgtgaggt

SEQ ID NO: 1898441 - DNA, 15 bp, Homo sapiens
aggacttgtgaggtg

SEQ ID NO: 1898442 - DNA, 15 bp, Homo sapiens
ggacttgtgaggtgg

SEQ ID NO: 1898443 - DNA, 15 bp, Homo sapiens
gacttgtgaggtggg

SEQ ID NO: 1898444 - DNA, 15 bp, Homo sapiens
acttgtgaggtgggt

SEQ ID NO: 1898445 - DNA, 15 bp, Homo sapiens
cttgtgaggtgggta

SEQ ID NO: 1898446 - DNA, 15 bp, Homo sapiens
ttgtgaggtgggtag

SEQ ID NO: 1898447 - DNA, 15 bp, Homo sapiens
tgtgaggtgggtagt

SEQ ID NO: 1898448 - DNA, 15 bp, Homo sapiens
gtgaggtgggtagtt

SEQ ID NO: 1898449 - DNA, 15 bp, Homo sapiens
tgaggtgggtagttc

SEQ ID NO: 1898450 - DNA, 15 bp, Homo sapiens
gaggtgggtagttca

SEQ ID NO: 1898451 - DNA, 15 bp, Homo sapiens
aggtgggtagttcac

SEQ ID NO: 1898452 - DNA, 15 bp, Homo sapiens
ggtgggtagttcaca

SEQ ID NO: 1898453 - DNA, 15 bp, Homo sapiens
gtgggtagttcacat

SEQ ID NO: 1898454 - DNA, 15 bp, Homo sapiens
tgggtagttcacata

SEQ ID NO: 1898455 - DNA, 15 bp, Homo sapiens
gggtagttcacataa

SEQ ID NO: 1898456 - DNA, 15 bp, Homo sapiens
ggtagttcacataac

SEQ ID NO: 1898457 - DNA, 15 bp, Homo sapiens
gtagttcacataaca

SEQ ID NO: 1898458 - DNA, 15 bp, Homo sapiens
tagttcacataacaa

SEQ ID NO: 1898459 - DNA, 15 bp, Homo sapiens
agttcacataacaat

SEQ ID NO: 1898460 - DNA, 15 bp, Homo sapiens
gttcacataacaatt

SEQ ID NO: 1898461 - DNA, 15 bp, Homo sapiens
ttcacataacaatta

SEQ ID NO: 1898462 - DNA, 15 bp, Homo sapiens
tcacataacaattac

SEQ ID NO: 1898463 - DNA, 15 bp, Homo sapiens
cacataacaattacc

SEQ ID NO: 1898464 - DNA, 15 bp, Homo sapiens
acataacaattaccc

SEQ ID NO: 1898465 - DNA, 15 bp, Homo sapiens
cataacaattaccct

SEQ ID NO: 1898466 - DNA, 15 bp, Homo sapiens
ataacaattacccta

SEQ ID NO: 1898467 - DNA, 15 bp, Homo sapiens
taacaattaccctaa

SEQ ID NO: 1898468 - DNA, 15 bp, Homo sapiens
aacaattaccctaat

SEQ ID NO: 1898469 - DNA, 15 bp, Homo sapiens
acaattaccctaata

SEQ ID NO: 1898470 - DNA, 15 bp, Homo sapiens
caattaccctaatat

SEQ ID NO: 1898471 - DNA, 15 bp, Homo sapiens
aattaccctaatatc

SEQ ID NO: 1898472 - DNA, 15 bp, Homo sapiens
attaccctaatatcg

SEQ ID NO: 1898473 - DNA, 15 bp, Homo sapiens
ttaccctaatatcgt

SEQ ID NO: 1898474 - DNA, 15 bp, Homo sapiens
taccctaatatcgta

SEQ ID NO: 1898475 - DNA, 15 bp, Homo sapiens
accctaatatcgtag

SEQ ID NO: 1898476 - DNA, 15 bp, Homo sapiens
ccctaatatcgtaga

SEQ ID NO: 1898477 - DNA, 15 bp, Homo sapiens
cctaatatcgtagat

SEQ ID NO: 1898478 - DNA, 15 bp, Homo sapiens
ctaatatcgtagata

SEQ ID NO: 1898479 - DNA, 15 bp, Homo sapiens
taatatcgtagataa

SEQ ID NO: 1898480 - DNA, 15 bp, Homo sapiens
aatatcgtagataag

SEQ ID NO: 1898481 - DNA, 15 bp, Homo sapiens
atatcgtagataaga

SEQ ID NO: 1898482 - DNA, 15 bp, Homo sapiens
tatcgtagataagaa

SEQ ID NO: 1898483 - DNA, 15 bp, Homo sapiens
atcgtagataagaaa

SEQ ID NO: 1898484 - DNA, 15 bp, Homo sapiens
tcgtagataagaaaa

SEQ ID NO: 1898485 - DNA, 15 bp, Homo sapiens
cgtagataagaaaat

SEQ ID NO: 1898486 - DNA, 15 bp, Homo sapiens
gtagataagaaaatt

SEQ ID NO: 1898487 - DNA, 15 bp, Homo sapiens
tagataagaaaattg

SEQ ID NO: 1898488 - DNA, 15 bp, Homo sapiens
atttctgtctctaga

SEQ ID NO: 1898489 - DNA, 15 bp, Homo sapiens
tttctgtctctagaa

SEQ ID NO: 1898490 - DNA, 15 bp, Homo sapiens
ttctgtctctagaaa

SEQ ID NO: 1898491 - DNA, 15 bp, Homo sapiens
tctgtctctagaaag

SEQ ID NO: 1898492 - DNA, 15 bp, Homo sapiens
ctgtctctagaaagt

SEQ ID NO: 1898493 - DNA, 15 bp, Homo sapiens
tgtctctagaaagtt

SEQ ID NO: 1898494 - DNA, 15 bp, Homo sapiens
gtctctagaaagttg

SEQ ID NO: 1898495 - DNA, 15 bp, Homo sapiens
tctctagaaagttgc

SEQ ID NO: 1898496 - DNA, 15 bp, Homo sapiens
ctctagaaagttgct

SEQ ID NO: 1898497 - DNA, 15 bp, Homo sapiens
tctagaaagttgctt

SEQ ID NO: 1898498 - DNA, 15 bp, Homo sapiens
ctagaaagttgcttt

SEQ ID NO: 1898499 - DNA, 15 bp, Homo sapiens
tagaaagttgcttta

SEQ ID NO: 1898500 - DNA, 15 bp, Homo sapiens
agaaagttgctttaa

SEQ ID NO: 1898501 - DNA, 15 bp, Homo sapiens
gaaagttgctttaac

SEQ ID NO: 1898502 - DNA, 15 bp, Homo sapiens
aaagttgctttaact

SEQ ID NO: 1898503 - DNA, 15 bp, Homo sapiens
aagttgctttaactt

SEQ ID NO: 1898504 - DNA, 15 bp, Homo sapiens
agttgctttaacttc

SEQ ID NO: 1898505 - DNA, 15 bp, Homo sapiens
gttgctttaacttct

SEQ ID NO: 1898506 - DNA, 15 bp, Homo sapiens
ttgctttaacttctc

SEQ ID NO: 1898507 - DNA, 15 bp, Homo sapiens
tgctttaacttctct

SEQ ID NO: 1898508 - DNA, 15 bp, Homo sapiens
gctttaacttctctg

SEQ ID NO: 1898509 - DNA, 15 bp, Homo sapiens
ctttaacttctctgc

SEQ ID NO: 1898510 - DNA, 15 bp, Homo sapiens
tttaacttctctgcc

SEQ ID NO: 1898511 - DNA, 15 bp, Homo sapiens
ttaacttctctgcct

SEQ ID NO: 1898512 - DNA, 15 bp, Homo sapiens
taacttctctgcctc

SEQ ID NO: 1898513 - DNA, 15 bp, Homo sapiens
aacttctctgcctct

SEQ ID NO: 1898514 - DNA, 15 bp, Homo sapiens
acttctctgcctcta

SEQ ID NO: 1898515 - DNA, 15 bp, Homo sapiens
cttctctgcctctac

SEQ ID NO: 1898516 - DNA, 15 bp, Homo sapiens
ttctctgcctctacg

SEQ ID NO: 1898517 - DNA, 15 bp, Homo sapiens
tctctgcctctacgt

SEQ ID NO: 1898518 - DNA, 15 bp, Homo sapiens
ctctgcctctacgtg

SEQ ID NO: 1898519 - DNA, 15 bp, Homo sapiens
tctgcctctacgtgt

SEQ ID NO: 1898520 - DNA, 15 bp, Homo sapiens
ctgcctctacgtgtc

SEQ ID NO: 1898521 - DNA, 15 bp, Homo sapiens
tgcctctacgtgtct

SEQ ID NO: 1898522 - DNA, 15 bp, Homo sapiens
gcctctacgtgtctc

SEQ ID NO: 1898523 - DNA, 15 bp, Homo sapiens
cctctacgtgtctct

SEQ ID NO: 1898524 - DNA, 15 bp, Homo sapiens
ctctacgtgtctctt

SEQ ID NO: 1898525 - DNA, 15 bp, Homo sapiens
tctacgtgtctcttg

SEQ ID NO: 1898526 - DNA, 15 bp, Homo sapiens
ctacgtgtctcttga

SEQ ID NO: 1898527 - DNA, 15 bp, Homo sapiens
tacgtgtctcttgac

SEQ ID NO: 1898528 - DNA, 15 bp, Homo sapiens
acgtgtctcttgaca

SEQ ID NO: 1898529 - DNA, 15 bp, Homo sapiens
cgtgtctcttgacat

SEQ ID NO: 1898530 - DNA, 15 bp, Homo sapiens
gtgtctcttgacatt

SEQ ID NO: 1898531 - DNA, 15 bp, Homo sapiens
tgtctcttgacattc

SEQ ID NO: 1898532 - DNA, 15 bp, Homo sapiens
gtctcttgacattca

SEQ ID NO: 1898533 - DNA, 15 bp, Homo sapiens
tctcttgacattcag

SEQ ID NO: 1898534 - DNA, 15 bp, Homo sapiens
ctcttgacattcaga

SEQ ID NO: 1898535 - DNA, 15 bp, Homo sapiens
tcttgacattcagat

SEQ ID NO: 1898536 - DNA, 15 bp, Homo sapiens
cttgacattcagata

SEQ ID NO: 1898537 - DNA, 15 bp, Homo sapiens
ttgacattcagatat

SEQ ID NO: 1898538 - DNA, 15 bp, Homo sapiens
tgacattcagatatg

SEQ ID NO: 1898539 - DNA, 15 bp, Homo sapiens
gacattcagatatga

SEQ ID NO: 1898540 - DNA, 15 bp, Homo sapiens
acattcagatatgag

SEQ ID NO: 1898541 - DNA, 15 bp, Homo sapiens
cattcagatatgagg

SEQ ID NO: 1898542 - DNA, 15 bp, Homo sapiens
attcagatatgaggt

SEQ ID NO: 1898543 - DNA, 15 bp, Homo sapiens
ttcagatatgaggtg

SEQ ID NO: 1898544 - DNA, 15 bp, Homo sapiens
tcagatatgaggtgg

SEQ ID NO: 1898545 - DNA, 15 bp, Homo sapiens
cagatatgaggtggg

SEQ ID NO: 1898546 - DNA, 15 bp, Homo sapiens
agatatgaggtgggg

SEQ ID NO: 1898547 - DNA, 15 bp, Homo sapiens
gatatgaggtggggt

SEQ ID NO: 1898548 - DNA, 15 bp, Homo sapiens
atatgaggtggggta

SEQ ID NO: 1898549 - DNA, 15 bp, Homo sapiens
tatgaggtggggtag

SEQ ID NO: 1898550 - DNA, 15 bp, Homo sapiens
atgaggtggggtaga

SEQ ID NO: 1898551 - DNA, 15 bp, Homo sapiens
tgaggtggggtagag

SEQ ID NO: 1898552 - DNA, 15 bp, Homo sapiens
gaggtggggtagagg

SEQ ID NO: 1898553 - DNA, 15 bp, Homo sapiens
aggtggggtagaggt

SEQ ID NO: 1898554 - DNA, 15 bp, Homo sapiens
ggtggggtagaggtg

SEQ ID NO: 1898555 - DNA, 15 bp, Homo sapiens
gtggggtagaggtgg

SEQ ID NO: 1898556 - DNA, 15 bp, Homo sapiens
tggggtagaggtggt

SEQ ID NO: 1898557 - DNA, 15 bp, Homo sapiens
ggggtagaggtggtg

SEQ ID NO: 1898558 - DNA, 15 bp, Homo sapiens
gggtagaggtggtga

SEQ ID NO: 1898559 - DNA, 15 bp, Homo sapiens
ggtagaggtggtgac

SEQ ID NO: 1898560 - DNA, 15 bp, Homo sapiens
gtagaggtggtgacc

SEQ ID NO: 1898561 - DNA, 15 bp, Homo sapiens
tagaggtggtgacca

SEQ ID NO: 1898562 - DNA, 15 bp, Homo sapiens
agaggtggtgaccaa

SEQ ID NO: 1898563 - DNA, 15 bp, Homo sapiens
gaggtggtgaccaac

SEQ ID NO: 1898564 - DNA, 15 bp, Homo sapiens
aggtggtgaccaact

SEQ ID NO: 1898565 - DNA, 15 bp, Homo sapiens
ggtggtgaccaactt

SEQ ID NO: 1898566 - DNA, 15 bp, Homo sapiens
gtggtgaccaacttt

SEQ ID NO: 1898567 - DNA, 15 bp, Homo sapiens
tggtgaccaactttc

SEQ ID NO: 1898568 - DNA, 15 bp, Homo sapiens
ggtgaccaactttcc

SEQ ID NO: 1898569 - DNA, 15 bp, Homo sapiens
gtgaccaactttcca

SEQ ID NO: 1898570 - DNA, 15 bp, Homo sapiens
tgaccaactttccag

SEQ ID NO: 1898571 - DNA, 15 bp, Homo sapiens
gaccaactttccaga

SEQ ID NO: 1898572 - DNA, 15 bp, Homo sapiens
accaactttccagac

SEQ ID NO: 1898573 - DNA, 15 bp, Homo sapiens
ccaactttccagacg

SEQ ID NO: 1898574 - DNA, 15 bp, Homo sapiens
caactttccagacgc

SEQ ID NO: 1898575 - DNA, 15 bp, Homo sapiens
aactttccagacgcc

SEQ ID NO: 1898576 - DNA, 15 bp, Homo sapiens
actttccagacgcct

SEQ ID NO: 1898577 - DNA, 15 bp, Homo sapiens
ctttccagacgcctg

SEQ ID NO: 1898578 - DNA, 15 bp, Homo sapiens
tttccagacgcctga

SEQ ID NO: 1898579 - DNA, 15 bp, Homo sapiens
ttccagacgcctgag

SEQ ID NO: 1898580 - DNA, 15 bp, Homo sapiens
tccagacgcctgagt

SEQ ID NO: 1898581 - DNA, 15 bp, Homo sapiens
ccagacgcctgagtc

SEQ ID NO: 1898582 - DNA, 15 bp, Homo sapiens
cagacgcctgagtcc

SEQ ID NO: 1898583 - DNA, 15 bp, Homo sapiens
agacgcctgagtcca

SEQ ID NO: 1898584 - DNA, 15 bp, Homo sapiens
gacgcctgagtccaa

SEQ ID NO: 1898585 - DNA, 15 bp, Homo sapiens
acgcctgagtccaaa

SEQ ID NO: 1898586 - DNA, 15 bp, Homo sapiens
cgcctgagtccaaac

SEQ ID NO: 1898587 - DNA, 15 bp, Homo sapiens
gcctgagtccaaacc

SEQ ID NO: 1898588 - DNA, 15 bp, Homo sapiens
cctgagtccaaacct

SEQ ID NO: 1898589 - DNA, 15 bp, Homo sapiens
ctgagtccaaacctt

SEQ ID NO: 1898590 - DNA, 15 bp, Homo sapiens
tgagtccaaaccttc

SEQ ID NO: 1898591 - DNA, 15 bp, Homo sapiens
gagtccaaaccttct

SEQ ID NO: 1898592 - DNA, 15 bp, Homo sapiens
agtccaaaccttctt

SEQ ID NO: 1898593 - DNA, 15 bp, Homo sapiens
gtccaaaccttctta

SEQ ID NO: 1898594 - DNA, 15 bp, Homo sapiens
tccaaaccttcttag

SEQ ID NO: 1898595 - DNA, 15 bp, Homo sapiens
ccaaaccttcttagc

SEQ ID NO: 1898596 - DNA, 15 bp, Homo sapiens
caaaccttcttagct

SEQ ID NO: 1898597 - DNA, 15 bp, Homo sapiens
aaaccttcttagctt

SEQ ID NO: 1898598 - DNA, 15 bp, Homo sapiens
aaccttcttagctta

SEQ ID NO: 1898599 - DNA, 15 bp, Homo sapiens
accttcttagcttat

SEQ ID NO: 1898600 - DNA, 15 bp, Homo sapiens
ccttcttagcttatg

SEQ ID NO: 1898601 - DNA, 15 bp, Homo sapiens
cttcttagcttatgg

SEQ ID NO: 1898602 - DNA, 15 bp, Homo sapiens
ttcttagcttatggt

SEQ ID NO: 1898603 - DNA, 15 bp, Homo sapiens
cttagcttatggttt

SEQ ID NO: 1898604 - DNA, 15 bp, Homo sapiens
ttagcttatggtttt

SEQ ID NO: 1898605 - DNA, 15 bp, Homo sapiens
tagcttatggttttc

SEQ ID NO: 1898606 - DNA, 15 bp, Homo sapiens
agcttatggttttct

SEQ ID NO: 1898607 - DNA, 15 bp, Homo sapiens
gcttatggttttctt

SEQ ID NO: 1898608 - DNA, 15 bp, Homo sapiens
cttatggttttctta

SEQ ID NO: 1898609 - DNA, 15 bp, Homo sapiens
ttatggttttcttag

SEQ ID NO: 1898610 - DNA, 15 bp, Homo sapiens
tatggttttcttagg

SEQ ID NO: 1898611 - DNA, 15 bp, Homo sapiens
atggttttcttaggt

SEQ ID NO: 1898612 - DNA, 15 bp, Homo sapiens
tggttttcttaggtg

SEQ ID NO: 1898613 - DNA, 15 bp, Homo sapiens
ggttttcttaggtga

SEQ ID NO: 1898614 - DNA, 15 bp, Homo sapiens
gttttcttaggtgat

SEQ ID NO: 1898615 - DNA, 15 bp, Homo sapiens
ttttcttaggtgatg

SEQ ID NO: 1898616 - DNA, 15 bp, Homo sapiens
tttcttaggtgatgt

SEQ ID NO: 1898617 - DNA, 15 bp, Homo sapiens
ttcttaggtgatgtg

SEQ ID NO: 1898618 - DNA, 15 bp, Homo sapiens
tcttaggtgatgtgc

SEQ ID NO: 1898619 - DNA, 15 bp, Homo sapiens
cttaggtgatgtgca

SEQ ID NO: 1898620 - DNA, 15 bp, Homo sapiens
ttaggtgatgtgcaa

SEQ ID NO: 1898621 - DNA, 15 bp, Homo sapiens
taggtgatgtgcaaa

SEQ ID NO: 1898622 - DNA, 15 bp, Homo sapiens
aggtgatgtgcaaat

SEQ ID NO: 1898623 - DNA, 15 bp, Homo sapiens
ggtgatgtgcaaatc

SEQ ID NO: 1898624 - DNA, 15 bp, Homo sapiens
gtgatgtgcaaatca

SEQ ID NO: 1898625 - DNA, 15 bp, Homo sapiens
tgatgtgcaaatcaa

SEQ ID NO: 1898626 - DNA, 15 bp, Homo sapiens
gatgtgcaaatcaac

SEQ ID NO: 1898627 - DNA, 15 bp, Homo sapiens
atgtgcaaatcaaca

SEQ ID NO: 1898628 - DNA, 15 bp, Homo sapiens
tgtgcaaatcaacaa

SEQ ID NO: 1898629 - DNA, 15 bp, Homo sapiens
gtgcaaatcaacaaa

SEQ ID NO: 1898630 - DNA, 15 bp, Homo sapiens
tgcaaatcaacaaat

SEQ ID NO: 1898631 - DNA, 15 bp, Homo sapiens
gcaaatcaacaaata

SEQ ID NO: 1898632 - DNA, 15 bp, Homo sapiens
caaatcaacaaatat

SEQ ID NO: 1898633 - DNA, 15 bp, Homo sapiens
aaatcaacaaatata

SEQ ID NO: 1898634 - DNA, 15 bp, Homo sapiens
aatcaacaaatatat

SEQ ID NO: 1898635 - DNA, 15 bp, Homo sapiens
atcaacaaatatata

SEQ ID NO: 1898636 - DNA, 15 bp, Homo sapiens
tcaacaaatatatac

SEQ ID NO: 1898637 - DNA, 15 bp, Homo sapiens
caacaaatatatact

SEQ ID NO: 1898638 - DNA, 15 bp, Homo sapiens
aacaaatatatactt

SEQ ID NO: 1898639 - DNA, 15 bp, Homo sapiens
acaaatatatacttt

SEQ ID NO: 1898640 - DNA, 15 bp, Homo sapiens
caaatatatactttt

SEQ ID NO: 1898641 - DNA, 15 bp, Homo sapiens
aaatatatacttttt

SEQ ID NO: 1898642 - DNA, 15 bp, Homo sapiens
aatatatactttttt

SEQ ID NO: 1898643 - DNA, 15 bp, Homo sapiens
atatatacttttttt

SEQ ID NO: 1898644 - DNA, 15 bp, Homo sapiens
tatatactttttttt

SEQ ID NO: 1898645 - DNA, 15 bp, Homo sapiens
atatacttttttttt

SEQ ID NO: 1898646 - DNA, 15 bp, Homo sapiens
tatactttttttttt

SEQ ID NO: 1898647 - DNA, 15 bp, Homo sapiens
ttttttttttgagtt

SEQ ID NO: 1898648 - DNA, 15 bp, Homo sapiens
tttttttttgagttg

SEQ ID NO: 1898649 - DNA, 15 bp, Homo sapiens
ttttttttgagttgg

SEQ ID NO: 1898650 - DNA, 15 bp, Homo sapiens
tttttttgagttgga

SEQ ID NO: 1898651 - DNA, 15 bp, Homo sapiens
ttttttgagttggag

SEQ ID NO: 1898652 - DNA, 15 bp, Homo sapiens
tttttgagttggagt

SEQ ID NO: 1898653 - DNA, 15 bp, Homo sapiens
ttttgagttggagtt

SEQ ID NO: 1898654 - DNA, 15 bp, Homo sapiens
tttgagttggagttg

SEQ ID NO: 1898655 - DNA, 15 bp, Homo sapiens
ttgagttggagttgc

SEQ ID NO: 1898656 - DNA, 15 bp, Homo sapiens
tgagttggagttgca

SEQ ID NO: 1898657 - DNA, 15 bp, Homo sapiens
gagttggagttgcac

SEQ ID NO: 1898658 - DNA, 15 bp, Homo sapiens
agttggagttgcact

SEQ ID NO: 1898659 - DNA, 15 bp, Homo sapiens
gttggagttgcactc

SEQ ID NO: 1898660 - DNA, 15 bp, Homo sapiens
ttggagttgcactct

SEQ ID NO: 1898661 - DNA, 15 bp, Homo sapiens
tggagttgcactcta

SEQ ID NO: 1898662 - DNA, 15 bp, Homo sapiens
ggagttgcactctat

SEQ ID NO: 1898663 - DNA, 15 bp, Homo sapiens
gagttgcactctatc

SEQ ID NO: 1898664 - DNA, 15 bp, Homo sapiens
agttgcactctatca

SEQ ID NO: 1898665 - DNA, 15 bp, Homo sapiens
gttgcactctatcac

SEQ ID NO: 1898666 - DNA, 15 bp, Homo sapiens
ttgcactctatcacc

SEQ ID NO: 1898667 - DNA, 15 bp, Homo sapiens
tgcactctatcaccc

SEQ ID NO: 1898668 - DNA, 15 bp, Homo sapiens
gcactctatcaccca

SEQ ID NO: 1898669 - DNA, 15 bp, Homo sapiens
cactctatcacccag

SEQ ID NO: 1898670 - DNA, 15 bp, Homo sapiens
actctatcacccagg

SEQ ID NO: 1898671 - DNA, 15 bp, Homo sapiens
ctctatcacccaggc

SEQ ID NO: 1898672 - DNA, 15 bp, Homo sapiens
tctatcacccaggct

SEQ ID NO: 1898673 - DNA, 15 bp, Homo sapiens
ctatcacccaggctg

SEQ ID NO: 1898674 - DNA, 15 bp, Homo sapiens
tatcacccaggctgg

SEQ ID NO: 1898675 - DNA, 15 bp, Homo sapiens
atcacccaggctgga

SEQ ID NO: 1898676 - DNA, 15 bp, Homo sapiens
gcagtggcatgatcg

SEQ ID NO: 1898677 - DNA, 15 bp, Homo sapiens
cagtggcatgatcgt

SEQ ID NO: 1898678 - DNA, 15 bp, Homo sapiens
agtggcatgatcgtg

SEQ ID NO: 1898679 - DNA, 15 bp, Homo sapiens
gtggcatgatcgtgg

SEQ ID NO: 1898680 - DNA, 15 bp, Homo sapiens
tggcatgatcgtggc

SEQ ID NO: 1898681 - DNA, 15 bp, Homo sapiens
ggcatgatcgtggct

SEQ ID NO: 1898682 - DNA, 15 bp, Homo sapiens
gcatgatcgtggctc

SEQ ID NO: 1898683 - DNA, 15 bp, Homo sapiens
catgatcgtggctca

SEQ ID NO: 1898684 - DNA, 15 bp, Homo sapiens
atgatcgtggctcac

SEQ ID NO: 1898685 - DNA, 15 bp, Homo sapiens
atcgtggctcactgc

SEQ ID NO: 1898686 - DNA, 15 bp, Homo sapiens
tcgtggctcactgca

SEQ ID NO: 1898687 - DNA, 15 bp, Homo sapiens
cgtggctcactgcaa

SEQ ID NO: 1898688 - DNA, 15 bp, Homo sapiens
gtggctcactgcaac

SEQ ID NO: 1898689 - DNA, 15 bp, Homo sapiens
cactgcaacctcctc

SEQ ID NO: 1898690 - DNA, 15 bp, Homo sapiens
actgcaacctcctcc

SEQ ID NO: 1898691 - DNA, 15 bp, Homo sapiens
ctgcaacctcctcct

SEQ ID NO: 1898692 - DNA, 15 bp, Homo sapiens
tgcaacctcctcctc

SEQ ID NO: 1898693 - DNA, 15 bp, Homo sapiens
tcaagtgattctcgc

SEQ ID NO: 1898694 - DNA, 15 bp, Homo sapiens
caagtgattctcgca

SEQ ID NO: 1898695 - DNA, 15 bp, Homo sapiens
aagtgattctcgcac

SEQ ID NO: 1898696 - DNA, 15 bp, Homo sapiens
agtgattctcgcacc

SEQ ID NO: 1898697 - DNA, 15 bp, Homo sapiens
gtgattctcgcacct

SEQ ID NO: 1898698 - DNA, 15 bp, Homo sapiens
tgattctcgcacctc

SEQ ID NO: 1898699 - DNA, 15 bp, Homo sapiens
gattctcgcacctca

SEQ ID NO: 1898700 - DNA, 15 bp, Homo sapiens
attctcgcacctcag

SEQ ID NO: 1898701 - DNA, 15 bp, Homo sapiens
ttctcgcacctcagc

SEQ ID NO: 1898702 - DNA, 15 bp, Homo sapiens
tctcgcacctcagcc

SEQ ID NO: 1898703 - DNA, 15 bp, Homo sapiens
ctcgcacctcagcct

SEQ ID NO: 1898704 - DNA, 15 bp, Homo sapiens
tcgcacctcagcctc

SEQ ID NO: 1898705 - DNA, 15 bp, Homo sapiens
cgcacctcagcctcc

SEQ ID NO: 1898706 - DNA, 15 bp, Homo sapiens
gcacctcagcctcct

SEQ ID NO: 1898707 - DNA, 15 bp, Homo sapiens
caggtgcccgccact

SEQ ID NO: 1898708 - DNA, 15 bp, Homo sapiens
aggtgcccgccacta

SEQ ID NO: 1898709 - DNA, 15 bp, Homo sapiens
ggtgcccgccactac

SEQ ID NO: 1898710 - DNA, 15 bp, Homo sapiens
gtgcccgccactacg

SEQ ID NO: 1898711 - DNA, 15 bp, Homo sapiens
tgcccgccactacgc

SEQ ID NO: 1898712 - DNA, 15 bp, Homo sapiens
gcccgccactacgcc

SEQ ID NO: 1898713 - DNA, 15 bp, Homo sapiens
agataaggtttcact

SEQ ID NO: 1898714 - DNA, 15 bp, Homo sapiens
gataaggtttcacta

SEQ ID NO: 1898715 - DNA, 15 bp, Homo sapiens
ataaggtttcactat

SEQ ID NO: 1898716 - DNA, 15 bp, Homo sapiens
taaggtttcactata

SEQ ID NO: 1898717 - DNA, 15 bp, Homo sapiens
aaggtttcactatat

SEQ ID NO: 1898718 - DNA, 15 bp, Homo sapiens
aggtttcactatatt

SEQ ID NO: 1898719 - DNA, 15 bp, Homo sapiens
ggtttcactatattg

SEQ ID NO: 1898720 - DNA, 15 bp, Homo sapiens
gtttcactatattga

SEQ ID NO: 1898721 - DNA, 15 bp, Homo sapiens
tttcactatattgac

SEQ ID NO: 1898722 - DNA, 15 bp, Homo sapiens
ttcactatattgacc

SEQ ID NO: 1898723 - DNA, 15 bp, Homo sapiens
tcactatattgacca

SEQ ID NO: 1898724 - DNA, 15 bp, Homo sapiens
cactatattgaccag

SEQ ID NO: 1898725 - DNA, 15 bp, Homo sapiens
actatattgaccagg

SEQ ID NO: 1898726 - DNA, 15 bp, Homo sapiens
ctatattgaccaggc

SEQ ID NO: 1898727 - DNA, 15 bp, Homo sapiens
tatattgaccaggct

SEQ ID NO: 1898728 - DNA, 15 bp, Homo sapiens
atattgaccaggctg

SEQ ID NO: 1898729 - DNA, 15 bp, Homo sapiens
tattgaccaggctgg

SEQ ID NO: 1898730 - DNA, 15 bp, Homo sapiens
attgaccaggctggt

SEQ ID NO: 1898731 - DNA, 15 bp, Homo sapiens
ctcctgacctcaaga

SEQ ID NO: 1898732 - DNA, 15 bp, Homo sapiens
tcctgacctcaagag

SEQ ID NO: 1898733 - DNA, 15 bp, Homo sapiens
cctgacctcaagaga

SEQ ID NO: 1898734 - DNA, 15 bp, Homo sapiens
ctgacctcaagagat

SEQ ID NO: 1898735 - DNA, 15 bp, Homo sapiens
tgacctcaagagatc

SEQ ID NO: 1898736 - DNA, 15 bp, Homo sapiens
gacctcaagagatct

SEQ ID NO: 1898737 - DNA, 15 bp, Homo sapiens
acctcaagagatctg

SEQ ID NO: 1898738 - DNA, 15 bp, Homo sapiens
cctcaagagatctgc

SEQ ID NO: 1898739 - DNA, 15 bp, Homo sapiens
ctcaagagatctgcc

SEQ ID NO: 1898740 - DNA, 15 bp, Homo sapiens
tcaagagatctgccc

SEQ ID NO: 1898741 - DNA, 15 bp, Homo sapiens
caagagatctgccca

SEQ ID NO: 1898742 - DNA, 15 bp, Homo sapiens
aagagatctgcccac

SEQ ID NO: 1898743 - DNA, 15 bp, Homo sapiens
agagatctgcccacc

SEQ ID NO: 1898744 - DNA, 15 bp, Homo sapiens
gagatctgcccacct

SEQ ID NO: 1898745 - DNA, 15 bp, Homo sapiens
agatctgcccacctc

SEQ ID NO: 1898746 - DNA, 15 bp, Homo sapiens
gcccacctcagcctc

SEQ ID NO: 1898747 - DNA, 15 bp, Homo sapiens
aggcgtgaaccacct

SEQ ID NO: 1898748 - DNA, 15 bp, Homo sapiens
ggcgtgaaccacctt

SEQ ID NO: 1898749 - DNA, 15 bp, Homo sapiens
gcgtgaaccaccttg

SEQ ID NO: 1898750 - DNA, 15 bp, Homo sapiens
cgtgaaccaccttgc

SEQ ID NO: 1898751 - DNA, 15 bp, Homo sapiens
gtgaaccaccttgcc

SEQ ID NO: 1898752 - DNA, 15 bp, Homo sapiens
tgaaccaccttgcct

SEQ ID NO: 1898753 - DNA, 15 bp, Homo sapiens
gaaccaccttgcctg

SEQ ID NO: 1898754 - DNA, 15 bp, Homo sapiens
aaccaccttgcctgg

SEQ ID NO: 1898755 - DNA, 15 bp, Homo sapiens
accaccttgcctggc

SEQ ID NO: 1898756 - DNA, 15 bp, Homo sapiens
ccaccttgcctggcc

SEQ ID NO: 1898757 - DNA, 15 bp, Homo sapiens
caccttgcctggcca

SEQ ID NO: 1898758 - DNA, 15 bp, Homo sapiens
accttgcctggccaa

SEQ ID NO: 1898759 - DNA, 15 bp, Homo sapiens
ccttgcctggccaac

SEQ ID NO: 1898760 - DNA, 15 bp, Homo sapiens
cttgcctggccaaca

SEQ ID NO: 1898761 - DNA, 15 bp, Homo sapiens
ttgcctggccaacat

SEQ ID NO: 1898762 - DNA, 15 bp, Homo sapiens
tgcctggccaacata

SEQ ID NO: 1898763 - DNA, 15 bp, Homo sapiens
gcctggccaacatat

SEQ ID NO: 1898764 - DNA, 15 bp, Homo sapiens
cctggccaacatata

SEQ ID NO: 1898765 - DNA, 15 bp, Homo sapiens
ctggccaacatatat

SEQ ID NO: 1898766 - DNA, 15 bp, Homo sapiens
tggccaacatatata

SEQ ID NO: 1898767 - DNA, 15 bp, Homo sapiens
ggccaacatatatat

SEQ ID NO: 1898768 - DNA, 15 bp, Homo sapiens
gccaacatatatata

SEQ ID NO: 1898769 - DNA, 15 bp, Homo sapiens
ccaacatatatatac

SEQ ID NO: 1898770 - DNA, 15 bp, Homo sapiens
caacatatatatacc

SEQ ID NO: 1898771 - DNA, 15 bp, Homo sapiens
aacatatatatacct

SEQ ID NO: 1898772 - DNA, 15 bp, Homo sapiens
acatatatatacctt

SEQ ID NO: 1898773 - DNA, 15 bp, Homo sapiens
catatatataccttt

SEQ ID NO: 1898774 - DNA, 15 bp, Homo sapiens
atatatatacctttt

SEQ ID NO: 1898775 - DNA, 15 bp, Homo sapiens
tatatataccttttg

SEQ ID NO: 1898776 - DNA, 15 bp, Homo sapiens
atatataccttttgc

SEQ ID NO: 1898777 - DNA, 15 bp, Homo sapiens
tatataccttttgca

SEQ ID NO: 1898778 - DNA, 15 bp, Homo sapiens
atataccttttgcaa

SEQ ID NO: 1898779 - DNA, 15 bp, Homo sapiens
tataccttttgcaac

SEQ ID NO: 1898780 - DNA, 15 bp, Homo sapiens
ataccttttgcaact

SEQ ID NO: 1898781 - DNA, 15 bp, Homo sapiens
taccttttgcaactt

SEQ ID NO: 1898782 - DNA, 15 bp, Homo sapiens
accttttgcaacttt

SEQ ID NO: 1898783 - DNA, 15 bp, Homo sapiens
ccttttgcaactttg

SEQ ID NO: 1898784 - DNA, 15 bp, Homo sapiens
cttttgcaactttgt

SEQ ID NO: 1898785 - DNA, 15 bp, Homo sapiens
ttttgcaactttgtc

SEQ ID NO: 1898786 - DNA, 15 bp, Homo sapiens
tttgcaactttgtca

SEQ ID NO: 1898787 - DNA, 15 bp, Homo sapiens
ttgcaactttgtcag

SEQ ID NO: 1898788 - DNA, 15 bp, Homo sapiens
tgcaactttgtcaga

SEQ ID NO: 1898789 - DNA, 15 bp, Homo sapiens
gcaactttgtcagag

SEQ ID NO: 1898790 - DNA, 15 bp, Homo sapiens
caactttgtcagagt

SEQ ID NO: 1898791 - DNA, 15 bp, Homo sapiens
aactttgtcagagtt

SEQ ID NO: 1898792 - DNA, 15 bp, Homo sapiens
actttgtcagagttg

SEQ ID NO: 1898793 - DNA, 15 bp, Homo sapiens
ctttgtcagagttgc

SEQ ID NO: 1898794 - DNA, 15 bp, Homo sapiens
tttgtcagagttgct

SEQ ID NO: 1898795 - DNA, 15 bp, Homo sapiens
ttgtcagagttgcta

SEQ ID NO: 1898796 - DNA, 15 bp, Homo sapiens
tgtcagagttgctat

SEQ ID NO: 1898797 - DNA, 15 bp, Homo sapiens
gtcagagttgctatg

SEQ ID NO: 1898798 - DNA, 15 bp, Homo sapiens
tcagagttgctatga

SEQ ID NO: 1898799 - DNA, 15 bp, Homo sapiens
cagagttgctatgaa

SEQ ID NO: 1898800 - DNA, 15 bp, Homo sapiens
agagttgctatgaag

SEQ ID NO: 1898801 - DNA, 15 bp, Homo sapiens
gagttgctatgaaga

SEQ ID NO: 1898802 - DNA, 15 bp, Homo sapiens
agttgctatgaagaa

SEQ ID NO: 1898803 - DNA, 15 bp, Homo sapiens
gttgctatgaagaat

SEQ ID NO: 1898804 - DNA, 15 bp, Homo sapiens
ttgctatgaagaata

SEQ ID NO: 1898805 - DNA, 15 bp, Homo sapiens
tgctatgaagaataa

SEQ ID NO: 1898806 - DNA, 15 bp, Homo sapiens
gctatgaagaataag

SEQ ID NO: 1898807 - DNA, 15 bp, Homo sapiens
ctatgaagaataagt

SEQ ID NO: 1898808 - DNA, 15 bp, Homo sapiens
tatgaagaataagtt

SEQ ID NO: 1898809 - DNA, 15 bp, Homo sapiens
atgaagaataagttg

SEQ ID NO: 1898810 - DNA, 15 bp, Homo sapiens
tgaagaataagttgt

SEQ ID NO: 1898811 - DNA, 15 bp, Homo sapiens
gaagaataagttgta

SEQ ID NO: 1898812 - DNA, 15 bp, Homo sapiens
aagaataagttgtat

SEQ ID NO: 1898813 - DNA, 15 bp, Homo sapiens
agaataagttgtatc

SEQ ID NO: 1898814 - DNA, 15 bp, Homo sapiens
gaataagttgtatct

SEQ ID NO: 1898815 - DNA, 15 bp, Homo sapiens
aataagttgtatctt

SEQ ID NO: 1898816 - DNA, 15 bp, Homo sapiens
ataagttgtatcttg

SEQ ID NO: 1898817 - DNA, 15 bp, Homo sapiens
taagttgtatcttgt

SEQ ID NO: 1898818 - DNA, 15 bp, Homo sapiens
aagttgtatcttgtt

SEQ ID NO: 1898819 - DNA, 15 bp, Homo sapiens
agttgtatcttgttc

SEQ ID NO: 1898820 - DNA, 15 bp, Homo sapiens
gttgtatcttgttca

SEQ ID NO: 1898821 - DNA, 15 bp, Homo sapiens
ttgtatcttgttcac

SEQ ID NO: 1898822 - DNA, 15 bp, Homo sapiens
tgtatcttgttcaca

SEQ ID NO: 1898823 - DNA, 15 bp, Homo sapiens
gtatcttgttcacag

SEQ ID NO: 1898824 - DNA, 15 bp, Homo sapiens
tatcttgttcacaga

SEQ ID NO: 1898825 - DNA, 15 bp, Homo sapiens
atcttgttcacagaa

SEQ ID NO: 1898826 - DNA, 15 bp, Homo sapiens
tcttgttcacagaaa

SEQ ID NO: 1898827 - DNA, 15 bp, Homo sapiens
cttgttcacagaaat

SEQ ID NO: 1898828 - DNA, 15 bp, Homo sapiens
ttgttcacagaaatt

SEQ ID NO: 1898829 - DNA, 15 bp, Homo sapiens
tgttcacagaaattg

SEQ ID NO: 1898830 - DNA, 15 bp, Homo sapiens
gttcacagaaattgc

SEQ ID NO: 1898831 - DNA, 15 bp, Homo sapiens
ttcacagaaattgca

SEQ ID NO: 1898832 - DNA, 15 bp, Homo sapiens
tcacagaaattgcag

SEQ ID NO: 1898833 - DNA, 15 bp, Homo sapiens
cacagaaattgcagt

SEQ ID NO: 1898834 - DNA, 15 bp, Homo sapiens
acagaaattgcagtc

SEQ ID NO: 1898835 - DNA, 15 bp, Homo sapiens
cagaaattgcagtct

SEQ ID NO: 1898836 - DNA, 15 bp, Homo sapiens
agaaattgcagtcta

SEQ ID NO: 1898837 - DNA, 15 bp, Homo sapiens
gaaattgcagtctac

SEQ ID NO: 1898838 - DNA, 15 bp, Homo sapiens
aaattgcagtctact

SEQ ID NO: 1898839 - DNA, 15 bp, Homo sapiens
aattgcagtctactg

SEQ ID NO: 1898840 - DNA, 15 bp, Homo sapiens
attgcagtctactgg

SEQ ID NO: 1898841 - DNA, 15 bp, Homo sapiens
ttgcagtctactggg

SEQ ID NO: 1898842 - DNA, 15 bp, Homo sapiens
tgcagtctactgggg

SEQ ID NO: 1898843 - DNA, 15 bp, Homo sapiens
gcagtctactggggg

SEQ ID NO: 1898844 - DNA, 15 bp, Homo sapiens
cagtctactggggga

SEQ ID NO: 1898845 - DNA, 15 bp, Homo sapiens
agtctactgggggag

SEQ ID NO: 1898846 - DNA, 15 bp, Homo sapiens
gtctactgggggagc

SEQ ID NO: 1898847 - DNA, 15 bp, Homo sapiens
tctactgggggagct

SEQ ID NO: 1898848 - DNA, 15 bp, Homo sapiens
ctactgggggagctg

SEQ ID NO: 1898849 - DNA, 15 bp, Homo sapiens
tactgggggagctga

SEQ ID NO: 1898850 - DNA, 15 bp, Homo sapiens
actgggggagctgat

SEQ ID NO: 1898851 - DNA, 15 bp, Homo sapiens
ctgggggagctgata

SEQ ID NO: 1898852 - DNA, 15 bp, Homo sapiens
tgggggagctgataa

SEQ ID NO: 1898853 - DNA, 15 bp, Homo sapiens
gggggagctgataaa

SEQ ID NO: 1898854 - DNA, 15 bp, Homo sapiens
ggggagctgataaat

SEQ ID NO: 1898855 - DNA, 15 bp, Homo sapiens
gggagctgataaatg

SEQ ID NO: 1898856 - DNA, 15 bp, Homo sapiens
ggagctgataaatgt

SEQ ID NO: 1898857 - DNA, 15 bp, Homo sapiens
gagctgataaatgtt

SEQ ID NO: 1898858 - DNA, 15 bp, Homo sapiens
agctgataaatgttt

SEQ ID NO: 1898859 - DNA, 15 bp, Homo sapiens
gctgataaatgtttt

SEQ ID NO: 1898860 - DNA, 15 bp, Homo sapiens
ctgataaatgtttta

SEQ ID NO: 1898861 - DNA, 15 bp, Homo sapiens
tgataaatgttttaa

SEQ ID NO: 1898862 - DNA, 15 bp, Homo sapiens
gataaatgttttaac

SEQ ID NO: 1898863 - DNA, 15 bp, Homo sapiens
ataaatgttttaacc

SEQ ID NO: 1898864 - DNA, 15 bp, Homo sapiens
taaatgttttaacca

SEQ ID NO: 1898865 - DNA, 15 bp, Homo sapiens
aaatgttttaaccat

SEQ ID NO: 1898866 - DNA, 15 bp, Homo sapiens
aatgttttaaccatc

SEQ ID NO: 1898867 - DNA, 15 bp, Homo sapiens
atgttttaaccatcc

SEQ ID NO: 1898868 - DNA, 15 bp, Homo sapiens
tgttttaaccatcca

SEQ ID NO: 1898869 - DNA, 15 bp, Homo sapiens
gttttaaccatccaa

SEQ ID NO: 1898870 - DNA, 15 bp, Homo sapiens
ttttaaccatccaat

SEQ ID NO: 1898871 - DNA, 15 bp, Homo sapiens
tttaaccatccaatg

SEQ ID NO: 1898872 - DNA, 15 bp, Homo sapiens
ttaaccatccaatgt

SEQ ID NO: 1898873 - DNA, 15 bp, Homo sapiens
taaccatccaatgta

SEQ ID NO: 1898874 - DNA, 15 bp, Homo sapiens
aaccatccaatgtaa

SEQ ID NO: 1898875 - DNA, 15 bp, Homo sapiens
accatccaatgtaac

SEQ ID NO: 1898876 - DNA, 15 bp, Homo sapiens
ccatccaatgtaaca

SEQ ID NO: 1898877 - DNA, 15 bp, Homo sapiens
catccaatgtaacat

SEQ ID NO: 1898878 - DNA, 15 bp, Homo sapiens
atccaatgtaacatg

SEQ ID NO: 1898879 - DNA, 15 bp, Homo sapiens
tccaatgtaacatgt

SEQ ID NO: 1898880 - DNA, 15 bp, Homo sapiens
ccaatgtaacatgtt

SEQ ID NO: 1898881 - DNA, 15 bp, Homo sapiens
caatgtaacatgttg

SEQ ID NO: 1898882 - DNA, 15 bp, Homo sapiens
aatgtaacatgttgt

SEQ ID NO: 1898883 - DNA, 15 bp, Homo sapiens
atgtaacatgttgtc

SEQ ID NO: 1898884 - DNA, 15 bp, Homo sapiens
tgtaacatgttgtca

SEQ ID NO: 1898885 - DNA, 15 bp, Homo sapiens
gtaacatgttgtcat

SEQ ID NO: 1898886 - DNA, 15 bp, Homo sapiens
taacatgttgtcatc

SEQ ID NO: 1898887 - DNA, 15 bp, Homo sapiens
aacatgttgtcatca

SEQ ID NO: 1898888 - DNA, 15 bp, Homo sapiens
acatgttgtcatcaa

SEQ ID NO: 1898889 - DNA, 15 bp, Homo sapiens
catgttgtcatcaaa

SEQ ID NO: 1898890 - DNA, 15 bp, Homo sapiens
atgttgtcatcaaag

SEQ ID NO: 1898891 - DNA, 15 bp, Homo sapiens
tgttgtcatcaaaga

SEQ ID NO: 1898892 - DNA, 15 bp, Homo sapiens
gttgtcatcaaagag

SEQ ID NO: 1898893 - DNA, 15 bp, Homo sapiens
ttgtcatcaaagaga

SEQ ID NO: 1898894 - DNA, 15 bp, Homo sapiens
tgtcatcaaagagat

SEQ ID NO: 1898895 - DNA, 15 bp, Homo sapiens
gtcatcaaagagatg

SEQ ID NO: 1898896 - DNA, 15 bp, Homo sapiens
tcatcaaagagatgg

SEQ ID NO: 1898897 - DNA, 15 bp, Homo sapiens
catcaaagagatggt

SEQ ID NO: 1898898 - DNA, 15 bp, Homo sapiens
atcaaagagatggtg

SEQ ID NO: 1898899 - DNA, 15 bp, Homo sapiens
tcaaagagatggtga

SEQ ID NO: 1898900 - DNA, 15 bp, Homo sapiens
caaagagatggtgag

SEQ ID NO: 1898901 - DNA, 15 bp, Homo sapiens
aaagagatggtgaga

SEQ ID NO: 1898902 - DNA, 15 bp, Homo sapiens
aagagatggtgagac

SEQ ID NO: 1898903 - DNA, 15 bp, Homo sapiens
agagatggtgagact

SEQ ID NO: 1898904 - DNA, 15 bp, Homo sapiens
gagatggtgagactt

SEQ ID NO: 1898905 - DNA, 15 bp, Homo sapiens
agatggtgagacttt

SEQ ID NO: 1898906 - DNA, 15 bp, Homo sapiens
gatggtgagacttta

SEQ ID NO: 1898907 - DNA, 15 bp, Homo sapiens
atggtgagactttac

SEQ ID NO: 1898908 - DNA, 15 bp, Homo sapiens
tggtgagactttaca

SEQ ID NO: 1898909 - DNA, 15 bp, Homo sapiens
ggtgagactttacac

SEQ ID NO: 1898910 - DNA, 15 bp, Homo sapiens
gtgagactttacact

SEQ ID NO: 1898911 - DNA, 15 bp, Homo sapiens
tgagactttacactt

SEQ ID NO: 1898912 - DNA, 15 bp, Homo sapiens
gagactttacacttg

SEQ ID NO: 1898913 - DNA, 15 bp, Homo sapiens
agactttacacttgt

SEQ ID NO: 1898914 - DNA, 15 bp, Homo sapiens
gactttacacttgtg

SEQ ID NO: 1898915 - DNA, 15 bp, Homo sapiens
actttacacttgtgc

SEQ ID NO: 1898916 - DNA, 15 bp, Homo sapiens
ctttacacttgtgct

SEQ ID NO: 1898917 - DNA, 15 bp, Homo sapiens
tttacacttgtgcta

SEQ ID NO: 1898918 - DNA, 15 bp, Homo sapiens
ttacacttgtgctaa

SEQ ID NO: 1898919 - DNA, 15 bp, Homo sapiens
tacacttgtgctaac

SEQ ID NO: 1898920 - DNA, 15 bp, Homo sapiens
acacttgtgctaaca

SEQ ID NO: 1898921 - DNA, 15 bp, Homo sapiens
cacttgtgctaacaa

SEQ ID NO: 1898922 - DNA, 15 bp, Homo sapiens
acttgtgctaacaag

SEQ ID NO: 1898923 - DNA, 15 bp, Homo sapiens
cttgtgctaacaagg

SEQ ID NO: 1898924 - DNA, 15 bp, Homo sapiens
ttgtgctaacaaggt

SEQ ID NO: 1898925 - DNA, 15 bp, Homo sapiens
tgtgctaacaaggta

SEQ ID NO: 1898926 - DNA, 15 bp, Homo sapiens
gtgctaacaaggtag

SEQ ID NO: 1898927 - DNA, 15 bp, Homo sapiens
tgctaacaaggtagc

SEQ ID NO: 1898928 - DNA, 15 bp, Homo sapiens
gctaacaaggtagct

SEQ ID NO: 1898929 - DNA, 15 bp, Homo sapiens
ctaacaaggtagctg

SEQ ID NO: 1898930 - DNA, 15 bp, Homo sapiens
taacaaggtagctgt

SEQ ID NO: 1898931 - DNA, 15 bp, Homo sapiens
aacaaggtagctgtt

SEQ ID NO: 1898932 - DNA, 15 bp, Homo sapiens
acaaggtagctgttc

SEQ ID NO: 1898933 - DNA, 15 bp, Homo sapiens
caaggtagctgttct

SEQ ID NO: 1898934 - DNA, 15 bp, Homo sapiens
aaggtagctgttcta

SEQ ID NO: 1898935 - DNA, 15 bp, Homo sapiens
aggtagctgttctac

SEQ ID NO: 1898936 - DNA, 15 bp, Homo sapiens
ggtagctgttctaca

SEQ ID NO: 1898937 - DNA, 15 bp, Homo sapiens
gtagctgttctacat

SEQ ID NO: 1898938 - DNA, 15 bp, Homo sapiens
tagctgttctacata

SEQ ID NO: 1898939 - DNA, 15 bp, Homo sapiens
agctgttctacataa

SEQ ID NO: 1898940 - DNA, 15 bp, Homo sapiens
gctgttctacataaa

SEQ ID NO: 1898941 - DNA, 15 bp, Homo sapiens
ctgttctacataaaa

SEQ ID NO: 1898942 - DNA, 15 bp, Homo sapiens
tgttctacataaaag

SEQ ID NO: 1898943 - DNA, 15 bp, Homo sapiens
gttctacataaaaga

SEQ ID NO: 1898944 - DNA, 15 bp, Homo sapiens
ttctacataaaagaa

SEQ ID NO: 1898945 - DNA, 15 bp, Homo sapiens
tctacataaaagaac

SEQ ID NO: 1898946 - DNA, 15 bp, Homo sapiens
ctacataaaagaaca

SEQ ID NO: 1898947 - DNA, 15 bp, Homo sapiens
tacataaaagaacat

SEQ ID NO: 1898948 - DNA, 15 bp, Homo sapiens
acataaaagaacata

SEQ ID NO: 1898949 - DNA, 15 bp, Homo sapiens
cataaaagaacatac

SEQ ID NO: 1898950 - DNA, 15 bp, Homo sapiens
ataaaagaacataca

SEQ ID NO: 1898951 - DNA, 15 bp, Homo sapiens
taaaagaacatacag

SEQ ID NO: 1898952 - DNA, 15 bp, Homo sapiens
aaaagaacatacagt

SEQ ID NO: 1898953 - DNA, 15 bp, Homo sapiens
aaagaacatacagta

SEQ ID NO: 1898954 - DNA, 15 bp, Homo sapiens
aagaacatacagtac

SEQ ID NO: 1898955 - DNA, 15 bp, Homo sapiens
agaacatacagtaca

SEQ ID NO: 1898956 - DNA, 15 bp, Homo sapiens
gaacatacagtacag

SEQ ID NO: 1898957 - DNA, 15 bp, Homo sapiens
aacatacagtacaga

SEQ ID NO: 1898958 - DNA, 15 bp, Homo sapiens
acatacagtacagat

SEQ ID NO: 1898959 - DNA, 15 bp, Homo sapiens
catacagtacagatg

SEQ ID NO: 1898960 - DNA, 15 bp, Homo sapiens
atacagtacagatgt

SEQ ID NO: 1898961 - DNA, 15 bp, Homo sapiens
tacagtacagatgta

SEQ ID NO: 1898962 - DNA, 15 bp, Homo sapiens
acagtacagatgtag

SEQ ID NO: 1898963 - DNA, 15 bp, Homo sapiens
cagtacagatgtaga

SEQ ID NO: 1898964 - DNA, 15 bp, Homo sapiens
agtacagatgtagaa

SEQ ID NO: 1898965 - DNA, 15 bp, Homo sapiens
gtacagatgtagaac

SEQ ID NO: 1898966 - DNA, 15 bp, Homo sapiens
tacagatgtagaact

SEQ ID NO: 1898967 - DNA, 15 bp, Homo sapiens
acagatgtagaactt

SEQ ID NO: 1898968 - DNA, 15 bp, Homo sapiens
cagatgtagaacttt

SEQ ID NO: 1898969 - DNA, 15 bp, Homo sapiens
agatgtagaactttt

SEQ ID NO: 1898970 - DNA, 15 bp, Homo sapiens
gatgtagaacttttc

SEQ ID NO: 1898971 - DNA, 15 bp, Homo sapiens
atgtagaacttttct

SEQ ID NO: 1898972 - DNA, 15 bp, Homo sapiens
tgtagaacttttctg

SEQ ID NO: 1898973 - DNA, 15 bp, Homo sapiens
gtagaacttttctgt

SEQ ID NO: 1898974 - DNA, 15 bp, Homo sapiens
tagaacttttctgtt

SEQ ID NO: 1898975 - DNA, 15 bp, Homo sapiens
agaacttttctgtta

SEQ ID NO: 1898976 - DNA, 15 bp, Homo sapiens
gaacttttctgttat

SEQ ID NO: 1898977 - DNA, 15 bp, Homo sapiens
aacttttctgttatc

SEQ ID NO: 1898978 - DNA, 15 bp, Homo sapiens
acttttctgttatca

SEQ ID NO: 1898979 - DNA, 15 bp, Homo sapiens
cttttctgttatcat

SEQ ID NO: 1898980 - DNA, 15 bp, Homo sapiens
ttttctgttatcata

SEQ ID NO: 1898981 - DNA, 15 bp, Homo sapiens
tttctgttatcatag

SEQ ID NO: 1898982 - DNA, 15 bp, Homo sapiens
ttctgttatcataga

SEQ ID NO: 1898983 - DNA, 15 bp, Homo sapiens
tctgttatcatagaa

SEQ ID NO: 1898984 - DNA, 15 bp, Homo sapiens
ctgttatcatagaac

SEQ ID NO: 1898985 - DNA, 15 bp, Homo sapiens
tgttatcatagaacg

SEQ ID NO: 1898986 - DNA, 15 bp, Homo sapiens
gttatcatagaacgt

SEQ ID NO: 1898987 - DNA, 15 bp, Homo sapiens
ttatcatagaacgtt

SEQ ID NO: 1898988 - DNA, 15 bp, Homo sapiens
tatcatagaacgttc

SEQ ID NO: 1898989 - DNA, 15 bp, Homo sapiens
atcatagaacgttct

SEQ ID NO: 1898990 - DNA, 15 bp, Homo sapiens
tcatagaacgttcta

SEQ ID NO: 1898991 - DNA, 15 bp, Homo sapiens
catagaacgttctat

SEQ ID NO: 1898992 - DNA, 15 bp, Homo sapiens
atagaacgttctatt

SEQ ID NO: 1898993 - DNA, 15 bp, Homo sapiens
tagaacgttctattg

SEQ ID NO: 1898994 - DNA, 15 bp, Homo sapiens
agaacgttctattgg

SEQ ID NO: 1898995 - DNA, 15 bp, Homo sapiens
gaacgttctattgga

SEQ ID NO: 1898996 - DNA, 15 bp, Homo sapiens
aacgttctattggac

SEQ ID NO: 1898997 - DNA, 15 bp, Homo sapiens
acgttctattggaca

SEQ ID NO: 1898998 - DNA, 15 bp, Homo sapiens
cgttctattggacag

SEQ ID NO: 1898999 - DNA, 15 bp, Homo sapiens
gttctattggacagt

SEQ ID NO: 1899000 - DNA, 15 bp, Homo sapiens
tattggacagtgcta

SEQ ID NO: 1899001 - DNA, 15 bp, Homo sapiens
attggacagtgctag

SEQ ID NO: 1899002 - DNA, 15 bp, Homo sapiens
ttggacagtgctagg

SEQ ID NO: 1899003 - DNA, 15 bp, Homo sapiens
tggacagtgctaggc

SEQ ID NO: 1899004 - DNA, 15 bp, Homo sapiens
ggacagtgctaggct

SEQ ID NO: 1899005 - DNA, 15 bp, Homo sapiens
gacagtgctaggctg

SEQ ID NO: 1899006 - DNA, 15 bp, Homo sapiens
acagtgctaggctga

SEQ ID NO: 1899007 - DNA, 15 bp, Homo sapiens
cagtgctaggctgaa

SEQ ID NO: 1899008 - DNA, 15 bp, Homo sapiens
agtgctaggctgaat

SEQ ID NO: 1899009 - DNA, 15 bp, Homo sapiens
gtgctaggctgaatg

SEQ ID NO: 1899010 - DNA, 15 bp, Homo sapiens
tgctaggctgaatgc

SEQ ID NO: 1899011 - DNA, 15 bp, Homo sapiens
gctaggctgaatgct

SEQ ID NO: 1899012 - DNA, 15 bp, Homo sapiens
ctaggctgaatgcta

SEQ ID NO: 1899013 - DNA, 15 bp, Homo sapiens
taggctgaatgctac

SEQ ID NO: 1899014 - DNA, 15 bp, Homo sapiens
aggctgaatgctaca

SEQ ID NO: 1899015 - DNA, 15 bp, Homo sapiens
ggctgaatgctacag

SEQ ID NO: 1899016 - DNA, 15 bp, Homo sapiens
gctgaatgctacaga

SEQ ID NO: 1899017 - DNA, 15 bp, Homo sapiens
ctgaatgctacagat

SEQ ID NO: 1899018 - DNA, 15 bp, Homo sapiens
tgaatgctacagatc

SEQ ID NO: 1899019 - DNA, 15 bp, Homo sapiens
gaatgctacagatct

SEQ ID NO: 1899020 - DNA, 15 bp, Homo sapiens
aatgctacagatctt

SEQ ID NO: 1899021 - DNA, 15 bp, Homo sapiens
atgctacagatcttc

SEQ ID NO: 1899022 - DNA, 15 bp, Homo sapiens
tgctacagatcttca

SEQ ID NO: 1899023 - DNA, 15 bp, Homo sapiens
gctacagatcttcag

SEQ ID NO: 1899024 - DNA, 15 bp, Homo sapiens
ctacagatcttcaga

SEQ ID NO: 1899025 - DNA, 15 bp, Homo sapiens
tacagatcttcagag

SEQ ID NO: 1899026 - DNA, 15 bp, Homo sapiens
acagatcttcagaga

SEQ ID NO: 1899027 - DNA, 15 bp, Homo sapiens
cagatcttcagagaa

SEQ ID NO: 1899028 - DNA, 15 bp, Homo sapiens
agatcttcagagaaa

SEQ ID NO: 1899029 - DNA, 15 bp, Homo sapiens
gatcttcagagaaag

SEQ ID NO: 1899030 - DNA, 15 bp, Homo sapiens
atcttcagagaaagg

SEQ ID NO: 1899031 - DNA, 15 bp, Homo sapiens
tcttcagagaaagga

SEQ ID NO: 1899032 - DNA, 15 bp, Homo sapiens
cttcagagaaaggag

SEQ ID NO: 1899033 - DNA, 15 bp, Homo sapiens
ttcagagaaaggaga

SEQ ID NO: 1899034 - DNA, 15 bp, Homo sapiens
tcagagaaaggagag

SEQ ID NO: 1899035 - DNA, 15 bp, Homo sapiens
cagagaaaggagagg

SEQ ID NO: 1899036 - DNA, 15 bp, Homo sapiens
agagaaaggagaggt

SEQ ID NO: 1899037 - DNA, 15 bp, Homo sapiens
gagaaaggagaggtt

SEQ ID NO: 1899038 - DNA, 15 bp, Homo sapiens
agaaaggagaggtta

SEQ ID NO: 1899039 - DNA, 15 bp, Homo sapiens
gaaaggagaggttat

SEQ ID NO: 1899040 - DNA, 15 bp, Homo sapiens
aaaggagaggttatg

SEQ ID NO: 1899041 - DNA, 15 bp, Homo sapiens
aaggagaggttatga

SEQ ID NO: 1899042 - DNA, 15 bp, Homo sapiens
aggagaggttatgag

SEQ ID NO: 1899043 - DNA, 15 bp, Homo sapiens
ggagaggttatgagg

SEQ ID NO: 1899044 - DNA, 15 bp, Homo sapiens
gagaggttatgaggc

SEQ ID NO: 1899045 - DNA, 15 bp, Homo sapiens
agaggttatgaggcc

SEQ ID NO: 1899046 - DNA, 15 bp, Homo sapiens
gaggttatgaggcct

SEQ ID NO: 1899047 - DNA, 15 bp, Homo sapiens
aggttatgaggcctg

SEQ ID NO: 1899048 - DNA, 15 bp, Homo sapiens
ggttatgaggcctgg

SEQ ID NO: 1899049 - DNA, 15 bp, Homo sapiens
gttatgaggcctgga

SEQ ID NO: 1899050 - DNA, 15 bp, Homo sapiens
ttatgaggcctggag

SEQ ID NO: 1899051 - DNA, 15 bp, Homo sapiens
tatgaggcctggagt

SEQ ID NO: 1899052 - DNA, 15 bp, Homo sapiens
atgaggcctggagtt

SEQ ID NO: 1899053 - DNA, 15 bp, Homo sapiens
tgaggcctggagttg

SEQ ID NO: 1899054 - DNA, 15 bp, Homo sapiens
gaggcctggagttgt

SEQ ID NO: 1899055 - DNA, 15 bp, Homo sapiens
aggcctggagttgtc

SEQ ID NO: 1899056 - DNA, 15 bp, Homo sapiens
ggcctggagttgtct

SEQ ID NO: 1899057 - DNA, 15 bp, Homo sapiens
gcctggagttgtcta

SEQ ID NO: 1899058 - DNA, 15 bp, Homo sapiens
cctggagttgtctag

SEQ ID NO: 1899059 - DNA, 15 bp, Homo sapiens
ctggagttgtctaga

SEQ ID NO: 1899060 - DNA, 15 bp, Homo sapiens
tggagttgtctagaa

SEQ ID NO: 1899061 - DNA, 15 bp, Homo sapiens
ggagttgtctagaaa

SEQ ID NO: 1899062 - DNA, 15 bp, Homo sapiens
gagttgtctagaaag

SEQ ID NO: 1899063 - DNA, 15 bp, Homo sapiens
agttgtctagaaagt

SEQ ID NO: 1899064 - DNA, 15 bp, Homo sapiens
gttgtctagaaagtc

SEQ ID NO: 1899065 - DNA, 15 bp, Homo sapiens
ttgtctagaaagtct

SEQ ID NO: 1899066 - DNA, 15 bp, Homo sapiens
tgtctagaaagtctt

SEQ ID NO: 1899067 - DNA, 15 bp, Homo sapiens
gtctagaaagtcttt

SEQ ID NO: 1899068 - DNA, 15 bp, Homo sapiens
tctagaaagtctttt

SEQ ID NO: 1899069 - DNA, 15 bp, Homo sapiens
ctagaaagtcttttt

SEQ ID NO: 1899070 - DNA, 15 bp, Homo sapiens
tagaaagtctttttg

SEQ ID NO: 1899071 - DNA, 15 bp, Homo sapiens
agaaagtctttttgc

SEQ ID NO: 1899072 - DNA, 15 bp, Homo sapiens
gaaagtctttttgcc

SEQ ID NO: 1899073 - DNA, 15 bp, Homo sapiens
aaagtctttttgcca

SEQ ID NO: 1899074 - DNA, 15 bp, Homo sapiens
aagtctttttgccaa

SEQ ID NO: 1899075 - DNA, 15 bp, Homo sapiens
agtctttttgccaaa

SEQ ID NO: 1899076 - DNA, 15 bp, Homo sapiens
gtctttttgccaaag

SEQ ID NO: 1899077 - DNA, 15 bp, Homo sapiens
tctttttgccaaaga

SEQ ID NO: 1899078 - DNA, 15 bp, Homo sapiens
ctttttgccaaagag

SEQ ID NO: 1899079 - DNA, 15 bp, Homo sapiens
tttttgccaaagagg

SEQ ID NO: 1899080 - DNA, 15 bp, Homo sapiens
ttttgccaaagaggg

SEQ ID NO: 1899081 - DNA, 15 bp, Homo sapiens
tttgccaaagaggga

SEQ ID NO: 1899082 - DNA, 15 bp, Homo sapiens
ttgccaaagagggat

SEQ ID NO: 1899083 - DNA, 15 bp, Homo sapiens
tgccaaagagggatt

SEQ ID NO: 1899084 - DNA, 15 bp, Homo sapiens
gccaaagagggattt

SEQ ID NO: 1899085 - DNA, 15 bp, Homo sapiens
ccaaagagggatttc

SEQ ID NO: 1899086 - DNA, 15 bp, Homo sapiens
caaagagggatttca

SEQ ID NO: 1899087 - DNA, 15 bp, Homo sapiens
aaagagggatttcaa

SEQ ID NO: 1899088 - DNA, 15 bp, Homo sapiens
aagagggatttcaac

SEQ ID NO: 1899089 - DNA, 15 bp, Homo sapiens
agagggatttcaact

SEQ ID NO: 1899090 - DNA, 15 bp, Homo sapiens
gagggatttcaactg

SEQ ID NO: 1899091 - DNA, 15 bp, Homo sapiens
agggatttcaactgg

SEQ ID NO: 1899092 - DNA, 15 bp, Homo sapiens
gggatttcaactggg

SEQ ID NO: 1899093 - DNA, 15 bp, Homo sapiens
ggatttcaactgggt

SEQ ID NO: 1899094 - DNA, 15 bp, Homo sapiens
gatttcaactgggtc

SEQ ID NO: 1899095 - DNA, 15 bp, Homo sapiens
atttcaactgggtcc

SEQ ID NO: 1899096 - DNA, 15 bp, Homo sapiens
tttcaactgggtccc

SEQ ID NO: 1899097 - DNA, 15 bp, Homo sapiens
ttcaactgggtccca

SEQ ID NO: 1899098 - DNA, 15 bp, Homo sapiens
tcaactgggtcccaa

SEQ ID NO: 1899099 - DNA, 15 bp, Homo sapiens
caactgggtcccaaa

SEQ ID NO: 1899100 - DNA, 15 bp, Homo sapiens
aactgggtcccaaat

SEQ ID NO: 1899101 - DNA, 15 bp, Homo sapiens
actgggtcccaaata

SEQ ID NO: 1899102 - DNA, 15 bp, Homo sapiens
ctgggtcccaaataa

SEQ ID NO: 1899103 - DNA, 15 bp, Homo sapiens
tgggtcccaaataat

SEQ ID NO: 1899104 - DNA, 15 bp, Homo sapiens
gggtcccaaataatg

SEQ ID NO: 1899105 - DNA, 15 bp, Homo sapiens
ggtcccaaataatgg

SEQ ID NO: 1899106 - DNA, 15 bp, Homo sapiens
gtcccaaataatggg

SEQ ID NO: 1899107 - DNA, 15 bp, Homo sapiens
tcccaaataatgggt

SEQ ID NO: 1899108 - DNA, 15 bp, Homo sapiens
cccaaataatgggtg

SEQ ID NO: 1899109 - DNA, 15 bp, Homo sapiens
ccaaataatgggtgg

SEQ ID NO: 1899110 - DNA, 15 bp, Homo sapiens
caaataatgggtgga

SEQ ID NO: 1899111 - DNA, 15 bp, Homo sapiens
aaataatgggtggaa

SEQ ID NO: 1899112 - DNA, 15 bp, Homo sapiens
aataatgggtggaat

SEQ ID NO: 1899113 - DNA, 15 bp, Homo sapiens
ataatgggtggaatt

SEQ ID NO: 1899114 - DNA, 15 bp, Homo sapiens
taatgggtggaattt

SEQ ID NO: 1899115 - DNA, 15 bp, Homo sapiens
aatgggtggaatttg

SEQ ID NO: 1899116 - DNA, 15 bp, Homo sapiens
atgggtggaatttga

SEQ ID NO: 1899117 - DNA, 15 bp, Homo sapiens
tgggtggaatttgat

SEQ ID NO: 1899118 - DNA, 15 bp, Homo sapiens
gggtggaatttgata

SEQ ID NO: 1899119 - DNA, 15 bp, Homo sapiens
ggtggaatttgatag

SEQ ID NO: 1899120 - DNA, 15 bp, Homo sapiens
gtggaatttgatagg

SEQ ID NO: 1899121 - DNA, 15 bp, Homo sapiens
tggaatttgataggt

SEQ ID NO: 1899122 - DNA, 15 bp, Homo sapiens
ggaatttgataggtg

SEQ ID NO: 1899123 - DNA, 15 bp, Homo sapiens
gaatttgataggtgt

SEQ ID NO: 1899124 - DNA, 15 bp, Homo sapiens
aatttgataggtgta

SEQ ID NO: 1899125 - DNA, 15 bp, Homo sapiens
atttgataggtgtaa

SEQ ID NO: 1899126 - DNA, 15 bp, Homo sapiens
tttgataggtgtaaa

SEQ ID NO: 1899127 - DNA, 15 bp, Homo sapiens
ttgataggtgtaaag

SEQ ID NO: 1899128 - DNA, 15 bp, Homo sapiens
tgataggtgtaaaga

SEQ ID NO: 1899129 - DNA, 15 bp, Homo sapiens
gataggtgtaaagaa

SEQ ID NO: 1899130 - DNA, 15 bp, Homo sapiens
ataggtgtaaagaat

SEQ ID NO: 1899131 - DNA, 15 bp, Homo sapiens
taggtgtaaagaatt

SEQ ID NO: 1899132 - DNA, 15 bp, Homo sapiens
aggtgtaaagaattt

SEQ ID NO: 1899133 - DNA, 15 bp, Homo sapiens
ggtgtaaagaatttg

SEQ ID NO: 1899134 - DNA, 15 bp, Homo sapiens
gtgtaaagaatttgc

SEQ ID NO: 1899135 - DNA, 15 bp, Homo sapiens
tgtaaagaatttgcg

SEQ ID NO: 1899136 - DNA, 15 bp, Homo sapiens
gtaaagaatttgcgg

SEQ ID NO: 1899137 - DNA, 15 bp, Homo sapiens
taaagaatttgcggt

SEQ ID NO: 1899138 - DNA, 15 bp, Homo sapiens
aaagaatttgcggtg

SEQ ID NO: 1899139 - DNA, 15 bp, Homo sapiens
aagaatttgcggtgg

SEQ ID NO: 1899140 - DNA, 15 bp, Homo sapiens
agaatttgcggtggt

SEQ ID NO: 1899141 - DNA, 15 bp, Homo sapiens
gaatttgcggtggtt

SEQ ID NO: 1899142 - DNA, 15 bp, Homo sapiens
aatttgcggtggttt

SEQ ID NO: 1899143 - DNA, 15 bp, Homo sapiens
atttgcggtggttta

SEQ ID NO: 1899144 - DNA, 15 bp, Homo sapiens
tttgcggtggtttat

SEQ ID NO: 1899145 - DNA, 15 bp, Homo sapiens
ttgcggtggtttatg

SEQ ID NO: 1899146 - DNA, 15 bp, Homo sapiens
tgcggtggtttatgc

SEQ ID NO: 1899147 - DNA, 15 bp, Homo sapiens
gcggtggtttatgcc

SEQ ID NO: 1899148 - DNA, 15 bp, Homo sapiens
cggtggtttatgcct

SEQ ID NO: 1899149 - DNA, 15 bp, Homo sapiens
ggtggtttatgcctg

SEQ ID NO: 1899150 - DNA, 15 bp, Homo sapiens
gtggtttatgcctgt

SEQ ID NO: 1899151 - DNA, 15 bp, Homo sapiens
tggtttatgcctgta

SEQ ID NO: 1899152 - DNA, 15 bp, Homo sapiens
ggtttatgcctgtaa

SEQ ID NO: 1899153 - DNA, 15 bp, Homo sapiens
gtttatgcctgtaat

SEQ ID NO: 1899154 - DNA, 15 bp, Homo sapiens
tttatgcctgtaatc

SEQ ID NO: 1899155 - DNA, 15 bp, Homo sapiens
tgaggcaggaggatt

SEQ ID NO: 1899156 - DNA, 15 bp, Homo sapiens
gaggcaggaggattg

SEQ ID NO: 1899157 - DNA, 15 bp, Homo sapiens
tgagaccagcttggg

SEQ ID NO: 1899158 - DNA, 15 bp, Homo sapiens
gagaccagcttgggc

SEQ ID NO: 1899159 - DNA, 15 bp, Homo sapiens
ccagcttgggcaacg

SEQ ID NO: 1899160 - DNA, 15 bp, Homo sapiens
cagcttgggcaacgt

SEQ ID NO: 1899161 - DNA, 15 bp, Homo sapiens
agcttgggcaacgtg

SEQ ID NO: 1899162 - DNA, 15 bp, Homo sapiens
gcttgggcaacgtgg

SEQ ID NO: 1899163 - DNA, 15 bp, Homo sapiens
cttgggcaacgtggt

SEQ ID NO: 1899164 - DNA, 15 bp, Homo sapiens
ttgggcaacgtggta

SEQ ID NO: 1899165 - DNA, 15 bp, Homo sapiens
tgggcaacgtggtaa

SEQ ID NO: 1899166 - DNA, 15 bp, Homo sapiens
gggcaacgtggtaaa

SEQ ID NO: 1899167 - DNA, 15 bp, Homo sapiens
ggcaacgtggtaaaa

SEQ ID NO: 1899168 - DNA, 15 bp, Homo sapiens
gcaacgtggtaaaac

SEQ ID NO: 1899169 - DNA, 15 bp, Homo sapiens
caacgtggtaaaact

SEQ ID NO: 1899170 - DNA, 15 bp, Homo sapiens
aacgtggtaaaactc

SEQ ID NO: 1899171 - DNA, 15 bp, Homo sapiens
acgtggtaaaactcc

SEQ ID NO: 1899172 - DNA, 15 bp, Homo sapiens
cgtggtaaaactccc

SEQ ID NO: 1899173 - DNA, 15 bp, Homo sapiens
gtggtaaaactccct

SEQ ID NO: 1899174 - DNA, 15 bp, Homo sapiens
tggtaaaactccctc

SEQ ID NO: 1899175 - DNA, 15 bp, Homo sapiens
ggtaaaactccctct

SEQ ID NO: 1899176 - DNA, 15 bp, Homo sapiens
gtaaaactccctctc

SEQ ID NO: 1899177 - DNA, 15 bp, Homo sapiens
taaaactccctctcc

SEQ ID NO: 1899178 - DNA, 15 bp, Homo sapiens
aaaactccctctccc

SEQ ID NO: 1899179 - DNA, 15 bp, Homo sapiens
aaactccctctcccc

SEQ ID NO: 1899180 - DNA, 15 bp, Homo sapiens
aactccctctcccct

SEQ ID NO: 1899181 - DNA, 15 bp, Homo sapiens
actccctctccccta

SEQ ID NO: 1899182 - DNA, 15 bp, Homo sapiens
ctccctctcccctaa

SEQ ID NO: 1899183 - DNA, 15 bp, Homo sapiens
tccctctcccctaaa

SEQ ID NO: 1899184 - DNA, 15 bp, Homo sapiens
ccctctcccctaaaa

SEQ ID NO: 1899185 - DNA, 15 bp, Homo sapiens
cctctcccctaaaaa

SEQ ID NO: 1899186 - DNA, 15 bp, Homo sapiens
ctctcccctaaaaat

SEQ ID NO: 1899187 - DNA, 15 bp, Homo sapiens
tctcccctaaaaata

SEQ ID NO: 1899188 - DNA, 15 bp, Homo sapiens
ctcccctaaaaataa

SEQ ID NO: 1899189 - DNA, 15 bp, Homo sapiens
tcccctaaaaataaa

SEQ ID NO: 1899190 - DNA, 15 bp, Homo sapiens
cccctaaaaataaaa

SEQ ID NO: 1899191 - DNA, 15 bp, Homo sapiens
ccctaaaaataaaaa

SEQ ID NO: 1899192 - DNA, 15 bp, Homo sapiens
cctaaaaataaaaaa

SEQ ID NO: 1899193 - DNA, 15 bp, Homo sapiens
taaaaataaaaaaaa

SEQ ID NO: 1899194 - DNA, 15 bp, Homo sapiens
aaaataaaaaaaatt

SEQ ID NO: 1899195 - DNA, 15 bp, Homo sapiens
aaataaaaaaaatta

SEQ ID NO: 1899196 - DNA, 15 bp, Homo sapiens
taaaaaaaattagcc

SEQ ID NO: 1899197 - DNA, 15 bp, Homo sapiens
aaaattagccaggcc

SEQ ID NO: 1899198 - DNA, 15 bp, Homo sapiens
aaattagccaggcct

SEQ ID NO: 1899199 - DNA, 15 bp, Homo sapiens
aattagccaggcctg

SEQ ID NO: 1899200 - DNA, 15 bp, Homo sapiens
attagccaggcctgg

SEQ ID NO: 1899201 - DNA, 15 bp, Homo sapiens
ttagccaggcctggt

SEQ ID NO: 1899202 - DNA, 15 bp, Homo sapiens
tagccaggcctggtg

SEQ ID NO: 1899203 - DNA, 15 bp, Homo sapiens
agccaggcctggtgg

SEQ ID NO: 1899204 - DNA, 15 bp, Homo sapiens
gccaggcctggtggc

SEQ ID NO: 1899205 - DNA, 15 bp, Homo sapiens
ccaggcctggtggcg

SEQ ID NO: 1899206 - DNA, 15 bp, Homo sapiens
caggcctggtggcgt

SEQ ID NO: 1899207 - DNA, 15 bp, Homo sapiens
aggcctggtggcgtg

SEQ ID NO: 1899208 - DNA, 15 bp, Homo sapiens
ggcctggtggcgtgg

SEQ ID NO: 1899209 - DNA, 15 bp, Homo sapiens
gcctggtggcgtgga

SEQ ID NO: 1899210 - DNA, 15 bp, Homo sapiens
cctggtggcgtggac

SEQ ID NO: 1899211 - DNA, 15 bp, Homo sapiens
ctggtggcgtggacc

SEQ ID NO: 1899212 - DNA, 15 bp, Homo sapiens
tggtggcgtggacct

SEQ ID NO: 1899213 - DNA, 15 bp, Homo sapiens
ggtggcgtggacctg

SEQ ID NO: 1899214 - DNA, 15 bp, Homo sapiens
gtggcgtggacctgt

SEQ ID NO: 1899215 - DNA, 15 bp, Homo sapiens
tggcgtggacctgta

SEQ ID NO: 1899216 - DNA, 15 bp, Homo sapiens
ggcgtggacctgtag

SEQ ID NO: 1899217 - DNA, 15 bp, Homo sapiens
gcgtggacctgtagt

SEQ ID NO: 1899218 - DNA, 15 bp, Homo sapiens
cgtggacctgtagtc

SEQ ID NO: 1899219 - DNA, 15 bp, Homo sapiens
gtggacctgtagtcc

SEQ ID NO: 1899220 - DNA, 15 bp, Homo sapiens
tggacctgtagtccc

SEQ ID NO: 1899221 - DNA, 15 bp, Homo sapiens
ggacctgtagtccca

SEQ ID NO: 1899222 - DNA, 15 bp, Homo sapiens
gtcccagctactggt

SEQ ID NO: 1899223 - DNA, 15 bp, Homo sapiens
tcccagctactggtg

SEQ ID NO: 1899224 - DNA, 15 bp, Homo sapiens
cccagctactggtga

SEQ ID NO: 1899225 - DNA, 15 bp, Homo sapiens
ccagctactggtgag

SEQ ID NO: 1899226 - DNA, 15 bp, Homo sapiens
cagctactggtgaga

SEQ ID NO: 1899227 - DNA, 15 bp, Homo sapiens
agctactggtgagac

SEQ ID NO: 1899228 - DNA, 15 bp, Homo sapiens
gctactggtgagact

SEQ ID NO: 1899229 - DNA, 15 bp, Homo sapiens
ctactggtgagacta

SEQ ID NO: 1899230 - DNA, 15 bp, Homo sapiens
tactggtgagactaa

SEQ ID NO: 1899231 - DNA, 15 bp, Homo sapiens
actggtgagactaag

SEQ ID NO: 1899232 - DNA, 15 bp, Homo sapiens
ctggtgagactaagg

SEQ ID NO: 1899233 - DNA, 15 bp, Homo sapiens
tggtgagactaaggt

SEQ ID NO: 1899234 - DNA, 15 bp, Homo sapiens
ggtgagactaaggtg

SEQ ID NO: 1899235 - DNA, 15 bp, Homo sapiens
gtgagactaaggtgg

SEQ ID NO: 1899236 - DNA, 15 bp, Homo sapiens
tgagactaaggtggg

SEQ ID NO: 1899237 - DNA, 15 bp, Homo sapiens
gagactaaggtggga

SEQ ID NO: 1899238 - DNA, 15 bp, Homo sapiens
agactaaggtgggag

SEQ ID NO: 1899239 - DNA, 15 bp, Homo sapiens
gactaaggtgggagg

SEQ ID NO: 1899240 - DNA, 15 bp, Homo sapiens
actaaggtgggagga

SEQ ID NO: 1899241 - DNA, 15 bp, Homo sapiens
taaggtgggaggatc

SEQ ID NO: 1899242 - DNA, 15 bp, Homo sapiens
gtgggaggatcaccc

SEQ ID NO: 1899243 - DNA, 15 bp, Homo sapiens
tgggaggatcaccca

SEQ ID NO: 1899244 - DNA, 15 bp, Homo sapiens
gggaggatcacccaa

SEQ ID NO: 1899245 - DNA, 15 bp, Homo sapiens
ggaggatcacccaag

SEQ ID NO: 1899246 - DNA, 15 bp, Homo sapiens
gaggatcacccaagc

SEQ ID NO: 1899247 - DNA, 15 bp, Homo sapiens
aggatcacccaagcc

SEQ ID NO: 1899248 - DNA, 15 bp, Homo sapiens
ggatcacccaagccc

SEQ ID NO: 1899249 - DNA, 15 bp, Homo sapiens
gatcacccaagcccc

SEQ ID NO: 1899250 - DNA, 15 bp, Homo sapiens
atcacccaagccccg

SEQ ID NO: 1899251 - DNA, 15 bp, Homo sapiens
tcacccaagccccgg

SEQ ID NO: 1899252 - DNA, 15 bp, Homo sapiens
cacccaagccccggg

SEQ ID NO: 1899253 - DNA, 15 bp, Homo sapiens
acccaagccccgggg

SEQ ID NO: 1899254 - DNA, 15 bp, Homo sapiens
cccaagccccggggg

SEQ ID NO: 1899255 - DNA, 15 bp, Homo sapiens
ccaagccccgggggt

SEQ ID NO: 1899256 - DNA, 15 bp, Homo sapiens
caagccccgggggtt

SEQ ID NO: 1899257 - DNA, 15 bp, Homo sapiens
aagccccgggggtta

SEQ ID NO: 1899258 - DNA, 15 bp, Homo sapiens
agccccgggggttaa

SEQ ID NO: 1899259 - DNA, 15 bp, Homo sapiens
gccccgggggttaag

SEQ ID NO: 1899260 - DNA, 15 bp, Homo sapiens
ccccgggggttaagg

SEQ ID NO: 1899261 - DNA, 15 bp, Homo sapiens
cccgggggttaaggc

SEQ ID NO: 1899262 - DNA, 15 bp, Homo sapiens
ccgggggttaaggct

SEQ ID NO: 1899263 - DNA, 15 bp, Homo sapiens
cgggggttaaggctg

SEQ ID NO: 1899264 - DNA, 15 bp, Homo sapiens
gggggttaaggctgc

SEQ ID NO: 1899265 - DNA, 15 bp, Homo sapiens
ggggttaaggctgca

SEQ ID NO: 1899266 - DNA, 15 bp, Homo sapiens
gggttaaggctgcag

SEQ ID NO: 1899267 - DNA, 15 bp, Homo sapiens
agtgagccgtgatcc

SEQ ID NO: 1899268 - DNA, 15 bp, Homo sapiens
gtgagccgtgatccc

SEQ ID NO: 1899269 - DNA, 15 bp, Homo sapiens
tgagccgtgatcccg

SEQ ID NO: 1899270 - DNA, 15 bp, Homo sapiens
gagccgtgatcccgc

SEQ ID NO: 1899271 - DNA, 15 bp, Homo sapiens
agccgtgatcccgcc

SEQ ID NO: 1899272 - DNA, 15 bp, Homo sapiens
gccgtgatcccgcca

SEQ ID NO: 1899273 - DNA, 15 bp, Homo sapiens
ccgtgatcccgccac

SEQ ID NO: 1899274 - DNA, 15 bp, Homo sapiens
cgtgatcccgccacc

SEQ ID NO: 1899275 - DNA, 15 bp, Homo sapiens
gtgatcccgccaccg

SEQ ID NO: 1899276 - DNA, 15 bp, Homo sapiens
tgatcccgccaccgc

SEQ ID NO: 1899277 - DNA, 15 bp, Homo sapiens
gatcccgccaccgca

SEQ ID NO: 1899278 - DNA, 15 bp, Homo sapiens
atcccgccaccgcac

SEQ ID NO: 1899279 - DNA, 15 bp, Homo sapiens
tcccgccaccgcact

SEQ ID NO: 1899280 - DNA, 15 bp, Homo sapiens
cccgccaccgcactc

SEQ ID NO: 1899281 - DNA, 15 bp, Homo sapiens
ccgccaccgcactcc

SEQ ID NO: 1899282 - DNA, 15 bp, Homo sapiens
accctgtctccaaaa

SEQ ID NO: 1899283 - DNA, 15 bp, Homo sapiens
ccctgtctccaaaaa

SEQ ID NO: 1899284 - DNA, 15 bp, Homo sapiens
cctgtctccaaaaaa

SEQ ID NO: 1899285 - DNA, 15 bp, Homo sapiens
ctgtctccaaaaaaa

SEQ ID NO: 1899286 - DNA, 15 bp, Homo sapiens
tgtctccaaaaaaaa

SEQ ID NO: 1899287 - DNA, 15 bp, Homo sapiens
gtctccaaaaaaaaa

SEQ ID NO: 1899288 - DNA, 15 bp, Homo sapiens
tctccaaaaaaaaaa

SEQ ID NO: 1899289 - DNA, 15 bp, Homo sapiens
ctccaaaaaaaaaaa

SEQ ID NO: 1899290 - DNA, 15 bp, Homo sapiens
tccaaaaaaaaaaaa

SEQ ID NO: 1899291 - DNA, 15 bp, Homo sapiens
aaaaaaaattcctgg

SEQ ID NO: 1899292 - DNA, 15 bp, Homo sapiens
aaaaaaattcctggt

SEQ ID NO: 1899293 - DNA, 15 bp, Homo sapiens
aaaaaattcctggta

SEQ ID NO: 1899294 - DNA, 15 bp, Homo sapiens
aaaaattcctggtag

SEQ ID NO: 1899295 - DNA, 15 bp, Homo sapiens
aaaattcctggtagc

SEQ ID NO: 1899296 - DNA, 15 bp, Homo sapiens
aaattcctggtagcc

SEQ ID NO: 1899297 - DNA, 15 bp, Homo sapiens
aattcctggtagccc

SEQ ID NO: 1899298 - DNA, 15 bp, Homo sapiens
attcctggtagcccg

SEQ ID NO: 1899299 - DNA, 15 bp, Homo sapiens
ttcctggtagcccgg

SEQ ID NO: 1899300 - DNA, 15 bp, Homo sapiens
tcctggtagcccggt

SEQ ID NO: 1899301 - DNA, 15 bp, Homo sapiens
cctggtagcccggta

SEQ ID NO: 1899302 - DNA, 15 bp, Homo sapiens
ctggtagcccggtag

SEQ ID NO: 1899303 - DNA, 15 bp, Homo sapiens
tggtagcccggtaga

SEQ ID NO: 1899304 - DNA, 15 bp, Homo sapiens
ggtagcccggtagac

SEQ ID NO: 1899305 - DNA, 15 bp, Homo sapiens
gtagcccggtagact

SEQ ID NO: 1899306 - DNA, 15 bp, Homo sapiens
tagcccggtagacta

SEQ ID NO: 1899307 - DNA, 15 bp, Homo sapiens
agcccggtagactag

SEQ ID NO: 1899308 - DNA, 15 bp, Homo sapiens
gcccggtagactagg

SEQ ID NO: 1899309 - DNA, 15 bp, Homo sapiens
cccggtagactagga

SEQ ID NO: 1899310 - DNA, 15 bp, Homo sapiens
ccggtagactaggag

SEQ ID NO: 1899311 - DNA, 15 bp, Homo sapiens
cggtagactaggagg

SEQ ID NO: 1899312 - DNA, 15 bp, Homo sapiens
ggtagactaggaggg

SEQ ID NO: 1899313 - DNA, 15 bp, Homo sapiens
gtagactaggagggt

SEQ ID NO: 1899314 - DNA, 15 bp, Homo sapiens
tagactaggagggta

SEQ ID NO: 1899315 - DNA, 15 bp, Homo sapiens
agactaggagggtaa

SEQ ID NO: 1899316 - DNA, 15 bp, Homo sapiens
gactaggagggtaag

SEQ ID NO: 1899317 - DNA, 15 bp, Homo sapiens
actaggagggtaagt

SEQ ID NO: 1899318 - DNA, 15 bp, Homo sapiens
ctaggagggtaagta

SEQ ID NO: 1899319 - DNA, 15 bp, Homo sapiens
taggagggtaagtag

SEQ ID NO: 1899320 - DNA, 15 bp, Homo sapiens
aggagggtaagtagg

SEQ ID NO: 1899321 - DNA, 15 bp, Homo sapiens
ggagggtaagtaggg

SEQ ID NO: 1899322 - DNA, 15 bp, Homo sapiens
gagggtaagtagggg

SEQ ID NO: 1899323 - DNA, 15 bp, Homo sapiens
agggtaagtagggga

SEQ ID NO: 1899324 - DNA, 15 bp, Homo sapiens
gggtaagtaggggag

SEQ ID NO: 1899325 - DNA, 15 bp, Homo sapiens
ggtaagtaggggaga

SEQ ID NO: 1899326 - DNA, 15 bp, Homo sapiens
gtaagtaggggagaa

SEQ ID NO: 1899327 - DNA, 15 bp, Homo sapiens
taagtaggggagaag

SEQ ID NO: 1899328 - DNA, 15 bp, Homo sapiens
aagtaggggagaagt

SEQ ID NO: 1899329 - DNA, 15 bp, Homo sapiens
agtaggggagaagtg

SEQ ID NO: 1899330 - DNA, 15 bp, Homo sapiens
gtaggggagaagtga

SEQ ID NO: 1899331 - DNA, 15 bp, Homo sapiens
taggggagaagtgat

SEQ ID NO: 1899332 - DNA, 15 bp, Homo sapiens
aggggagaagtgatt

SEQ ID NO: 1899333 - DNA, 15 bp, Homo sapiens
ggggagaagtgatta

SEQ ID NO: 1899334 - DNA, 15 bp, Homo sapiens
gggagaagtgattac

SEQ ID NO: 1899335 - DNA, 15 bp, Homo sapiens
ggagaagtgattact

SEQ ID NO: 1899336 - DNA, 15 bp, Homo sapiens
gagaagtgattactt

SEQ ID NO: 1899337 - DNA, 15 bp, Homo sapiens
agaagtgattactta

SEQ ID NO: 1899338 - DNA, 15 bp, Homo sapiens
gaagtgattacttac

SEQ ID NO: 1899339 - DNA, 15 bp, Homo sapiens
aagtgattacttaca

SEQ ID NO: 1899340 - DNA, 15 bp, Homo sapiens
agtgattacttacaa

SEQ ID NO: 1899341 - DNA, 15 bp, Homo sapiens
gtgattacttacaaa

SEQ ID NO: 1899342 - DNA, 15 bp, Homo sapiens
tgattacttacaaaa

SEQ ID NO: 1899343 - DNA, 15 bp, Homo sapiens
gattacttacaaaag

SEQ ID NO: 1899344 - DNA, 15 bp, Homo sapiens
attacttacaaaaga

SEQ ID NO: 1899345 - DNA, 15 bp, Homo sapiens
ttacttacaaaagac

SEQ ID NO: 1899346 - DNA, 15 bp, Homo sapiens
tacttacaaaagaca

SEQ ID NO: 1899347 - DNA, 15 bp, Homo sapiens
acttacaaaagacat

SEQ ID NO: 1899348 - DNA, 15 bp, Homo sapiens
cttacaaaagacatt

SEQ ID NO: 1899349 - DNA, 15 bp, Homo sapiens
ttacaaaagacattg

SEQ ID NO: 1899350 - DNA, 15 bp, Homo sapiens
tacaaaagacattga

SEQ ID NO: 1899351 - DNA, 15 bp, Homo sapiens
acaaaagacattgaa

SEQ ID NO: 1899352 - DNA, 15 bp, Homo sapiens
caaaagacattgaat

SEQ ID NO: 1899353 - DNA, 15 bp, Homo sapiens
aaaagacattgaata

SEQ ID NO: 1899354 - DNA, 15 bp, Homo sapiens
aaagacattgaatac

SEQ ID NO: 1899355 - DNA, 15 bp, Homo sapiens
aagacattgaataca

SEQ ID NO: 1899356 - DNA, 15 bp, Homo sapiens
agacattgaatacag

SEQ ID NO: 1899357 - DNA, 15 bp, Homo sapiens
gacattgaatacagg

SEQ ID NO: 1899358 - DNA, 15 bp, Homo sapiens
acattgaatacagga

SEQ ID NO: 1899359 - DNA, 15 bp, Homo sapiens
cattgaatacaggac

SEQ ID NO: 1899360 - DNA, 15 bp, Homo sapiens
attgaatacaggacc

SEQ ID NO: 1899361 - DNA, 15 bp, Homo sapiens
ttgaatacaggacca

SEQ ID NO: 1899362 - DNA, 15 bp, Homo sapiens
tgaatacaggaccaa

SEQ ID NO: 1899363 - DNA, 15 bp, Homo sapiens
gaatacaggaccaag

SEQ ID NO: 1899364 - DNA, 15 bp, Homo sapiens
aatacaggaccaagg

SEQ ID NO: 1899365 - DNA, 15 bp, Homo sapiens
atacaggaccaagga

SEQ ID NO: 1899366 - DNA, 15 bp, Homo sapiens
tacaggaccaaggaa

SEQ ID NO: 1899367 - DNA, 15 bp, Homo sapiens
acaggaccaaggaat

SEQ ID NO: 1899368 - DNA, 15 bp, Homo sapiens
caggaccaaggaatt

SEQ ID NO: 1899369 - DNA, 15 bp, Homo sapiens
aggaccaaggaattt

SEQ ID NO: 1899370 - DNA, 15 bp, Homo sapiens
ggaccaaggaatttc

SEQ ID NO: 1899371 - DNA, 15 bp, Homo sapiens
gaccaaggaatttca

SEQ ID NO: 1899372 - DNA, 15 bp, Homo sapiens
accaaggaatttcag

SEQ ID NO: 1899373 - DNA, 15 bp, Homo sapiens
ccaaggaatttcagt

SEQ ID NO: 1899374 - DNA, 15 bp, Homo sapiens
caaggaatttcagtt

SEQ ID NO: 1899375 - DNA, 15 bp, Homo sapiens
aaggaatttcagttc

SEQ ID NO: 1899376 - DNA, 15 bp, Homo sapiens
aggaatttcagttct

SEQ ID NO: 1899377 - DNA, 15 bp, Homo sapiens
ggaatttcagttctg

SEQ ID NO: 1899378 - DNA, 15 bp, Homo sapiens
gaatttcagttctgt

SEQ ID NO: 1899379 - DNA, 15 bp, Homo sapiens
aatttcagttctgtt

SEQ ID NO: 1899380 - DNA, 15 bp, Homo sapiens
atttcagttctgttc

SEQ ID NO: 1899381 - DNA, 15 bp, Homo sapiens
ttcagttctgttctt

SEQ ID NO: 1899382 - DNA, 15 bp, Homo sapiens
tcagttctgttcttt

SEQ ID NO: 1899383 - DNA, 15 bp, Homo sapiens
cagttctgttctttt

SEQ ID NO: 1899384 - DNA, 15 bp, Homo sapiens
agttctgttcttttg

SEQ ID NO: 1899385 - DNA, 15 bp, Homo sapiens
gttctgttcttttgt

SEQ ID NO: 1899386 - DNA, 15 bp, Homo sapiens
ttctgttcttttgta

SEQ ID NO: 1899387 - DNA, 15 bp, Homo sapiens
tctgttcttttgtag

SEQ ID NO: 1899388 - DNA, 15 bp, Homo sapiens
ctgttcttttgtagg

SEQ ID NO: 1899389 - DNA, 15 bp, Homo sapiens
tgttcttttgtaggg

SEQ ID NO: 1899390 - DNA, 15 bp, Homo sapiens
gttcttttgtagggg

SEQ ID NO: 1899391 - DNA, 15 bp, Homo sapiens
ttcttttgtagggga

SEQ ID NO: 1899392 - DNA, 15 bp, Homo sapiens
tcttttgtaggggaa

SEQ ID NO: 1899393 - DNA, 15 bp, Homo sapiens
cttttgtaggggaag

SEQ ID NO: 1899394 - DNA, 15 bp, Homo sapiens
ttttgtaggggaagc

SEQ ID NO: 1899395 - DNA, 15 bp, Homo sapiens
tttgtaggggaagct

SEQ ID NO: 1899396 - DNA, 15 bp, Homo sapiens
ttgtaggggaagctt

SEQ ID NO: 1899397 - DNA, 15 bp, Homo sapiens
tgtaggggaagcttt

SEQ ID NO: 1899398 - DNA, 15 bp, Homo sapiens
gtaggggaagctttt

SEQ ID NO: 1899399 - DNA, 15 bp, Homo sapiens
taggggaagctttta

SEQ ID NO: 1899400 - DNA, 15 bp, Homo sapiens
aggggaagcttttaa

SEQ ID NO: 1899401 - DNA, 15 bp, Homo sapiens
ggggaagcttttaaa

SEQ ID NO: 1899402 - DNA, 15 bp, Homo sapiens
gggaagcttttaaaa

SEQ ID NO: 1899403 - DNA, 15 bp, Homo sapiens
ggaagcttttaaaac

SEQ ID NO: 1899404 - DNA, 15 bp, Homo sapiens
gaagcttttaaaact

SEQ ID NO: 1899405 - DNA, 15 bp, Homo sapiens
aagcttttaaaactt

SEQ ID NO: 1899406 - DNA, 15 bp, Homo sapiens
agcttttaaaacttt

SEQ ID NO: 1899407 - DNA, 15 bp, Homo sapiens
gcttttaaaactttc

SEQ ID NO: 1899408 - DNA, 15 bp, Homo sapiens
cttttaaaactttcg

SEQ ID NO: 1899409 - DNA, 15 bp, Homo sapiens
ttttaaaactttcgg

SEQ ID NO: 1899410 - DNA, 15 bp, Homo sapiens
tttaaaactttcggg

SEQ ID NO: 1899411 - DNA, 15 bp, Homo sapiens
ttaaaactttcgggg

SEQ ID NO: 1899412 - DNA, 15 bp, Homo sapiens
taaaactttcggggc

SEQ ID NO: 1899413 - DNA, 15 bp, Homo sapiens
aaaactttcggggcg

SEQ ID NO: 1899414 - DNA, 15 bp, Homo sapiens
aaactttcggggcgc

SEQ ID NO: 1899415 - DNA, 15 bp, Homo sapiens
aactttcggggcgcc

SEQ ID NO: 1899416 - DNA, 15 bp, Homo sapiens
actttcggggcgccg

SEQ ID NO: 1899417 - DNA, 15 bp, Homo sapiens
ctttcggggcgccgg

SEQ ID NO: 1899418 - DNA, 15 bp, Homo sapiens
tttcggggcgccggg

SEQ ID NO: 1899419 - DNA, 15 bp, Homo sapiens
ttcggggcgccgggc

SEQ ID NO: 1899420 - DNA, 15 bp, Homo sapiens
tcggggcgccgggcg

SEQ ID NO: 1899421 - DNA, 15 bp, Homo sapiens
cggggcgccgggcgc

SEQ ID NO: 1899422 - DNA, 15 bp, Homo sapiens
ggggcgccgggcgcg

SEQ ID NO: 1899423 - DNA, 15 bp, Homo sapiens
gggcgccgggcgcgg

SEQ ID NO: 1899424 - DNA, 15 bp, Homo sapiens
ggcgccgggcgcggt

SEQ ID NO: 1899425 - DNA, 15 bp, Homo sapiens
gcgccgggcgcggtg

SEQ ID NO: 1899426 - DNA, 15 bp, Homo sapiens
cgccgggcgcggtgg

SEQ ID NO: 1899427 - DNA, 15 bp, Homo sapiens
tttgggaggcccaga

SEQ ID NO: 1899428 - DNA, 15 bp, Homo sapiens
ttgggaggcccagac

SEQ ID NO: 1899429 - DNA, 15 bp, Homo sapiens
tgggaggcccagacg

SEQ ID NO: 1899430 - DNA, 15 bp, Homo sapiens
gggaggcccagacgc

SEQ ID NO: 1899431 - DNA, 15 bp, Homo sapiens
ggaggcccagacgcg

SEQ ID NO: 1899432 - DNA, 15 bp, Homo sapiens
gaggcccagacgcgc

SEQ ID NO: 1899433 - DNA, 15 bp, Homo sapiens
aggcccagacgcgcg

SEQ ID NO: 1899434 - DNA, 15 bp, Homo sapiens
ggcccagacgcgcgg

SEQ ID NO: 1899435 - DNA, 15 bp, Homo sapiens
gcccagacgcgcgga

SEQ ID NO: 1899436 - DNA, 15 bp, Homo sapiens
cccagacgcgcggat

SEQ ID NO: 1899437 - DNA, 15 bp, Homo sapiens
ccagacgcgcggatc

SEQ ID NO: 1899438 - DNA, 15 bp, Homo sapiens
cagacgcgcggatca

SEQ ID NO: 1899439 - DNA, 15 bp, Homo sapiens
agacgcgcggatcac

SEQ ID NO: 1899440 - DNA, 15 bp, Homo sapiens
gacgcgcggatcacg

SEQ ID NO: 1899441 - DNA, 15 bp, Homo sapiens
acgcgcggatcacga

SEQ ID NO: 1899442 - DNA, 15 bp, Homo sapiens
cgcgcggatcacgag

SEQ ID NO: 1899443 - DNA, 15 bp, Homo sapiens
gcgcggatcacgagg

SEQ ID NO: 1899444 - DNA, 15 bp, Homo sapiens
cgcggatcacgaggc

SEQ ID NO: 1899445 - DNA, 15 bp, Homo sapiens
gcggatcacgaggcc

SEQ ID NO: 1899446 - DNA, 15 bp, Homo sapiens
cggatcacgaggcca

SEQ ID NO: 1899447 - DNA, 15 bp, Homo sapiens
ggatcacgaggccag

SEQ ID NO: 1899448 - DNA, 15 bp, Homo sapiens
gatcacgaggccagg

SEQ ID NO: 1899449 - DNA, 15 bp, Homo sapiens
atcacgaggccagga

SEQ ID NO: 1899450 - DNA, 15 bp, Homo sapiens
tcacgaggccaggag

SEQ ID NO: 1899451 - DNA, 15 bp, Homo sapiens
cacgaggccaggaga

SEQ ID NO: 1899452 - DNA, 15 bp, Homo sapiens
acgaggccaggagat

SEQ ID NO: 1899453 - DNA, 15 bp, Homo sapiens
cgaggccaggagatc

SEQ ID NO: 1899454 - DNA, 15 bp, Homo sapiens
gaggccaggagatcg

SEQ ID NO: 1899455 - DNA, 15 bp, Homo sapiens
aggccaggagatcga

SEQ ID NO: 1899456 - DNA, 15 bp, Homo sapiens
ggccaggagatcgag

SEQ ID NO: 1899457 - DNA, 15 bp, Homo sapiens
gccaggagatcgaga

SEQ ID NO: 1899458 - DNA, 15 bp, Homo sapiens
ccaggagatcgagac

SEQ ID NO: 1899459 - DNA, 15 bp, Homo sapiens
aaatacaaaaaaaag

SEQ ID NO: 1899460 - DNA, 15 bp, Homo sapiens
aatacaaaaaaaagt

SEQ ID NO: 1899461 - DNA, 15 bp, Homo sapiens
atacaaaaaaaagta

SEQ ID NO: 1899462 - DNA, 15 bp, Homo sapiens
tacaaaaaaaagtag

SEQ ID NO: 1899463 - DNA, 15 bp, Homo sapiens
acaaaaaaaagtagc

SEQ ID NO: 1899464 - DNA, 15 bp, Homo sapiens
caaaaaaaagtagcc

SEQ ID NO: 1899465 - DNA, 15 bp, Homo sapiens
aaaaaaaagtagccg

SEQ ID NO: 1899466 - DNA, 15 bp, Homo sapiens
aaaaaaagtagccgg

SEQ ID NO: 1899467 - DNA, 15 bp, Homo sapiens
aaaaaagtagccggg

SEQ ID NO: 1899468 - DNA, 15 bp, Homo sapiens
aaaaagtagccgggc

SEQ ID NO: 1899469 - DNA, 15 bp, Homo sapiens
aaaagtagccgggcg

SEQ ID NO: 1899470 - DNA, 15 bp, Homo sapiens
aaagtagccgggcgt

SEQ ID NO: 1899471 - DNA, 15 bp, Homo sapiens
aagtagccgggcgtt

SEQ ID NO: 1899472 - DNA, 15 bp, Homo sapiens
agtagccgggcgttg

SEQ ID NO: 1899473 - DNA, 15 bp, Homo sapiens
gtagccgggcgttgt

SEQ ID NO: 1899474 - DNA, 15 bp, Homo sapiens
tagccgggcgttgtg

SEQ ID NO: 1899475 - DNA, 15 bp, Homo sapiens
agccgggcgttgtgg

SEQ ID NO: 1899476 - DNA, 15 bp, Homo sapiens
gccgggcgttgtggc

SEQ ID NO: 1899477 - DNA, 15 bp, Homo sapiens
ccgggcgttgtggcg

SEQ ID NO: 1899478 - DNA, 15 bp, Homo sapiens
cgggcgttgtggcgg

SEQ ID NO: 1899479 - DNA, 15 bp, Homo sapiens
gggcgttgtggcggg

SEQ ID NO: 1899480 - DNA, 15 bp, Homo sapiens
ggcgttgtggcgggc

SEQ ID NO: 1899481 - DNA, 15 bp, Homo sapiens
gcgttgtggcgggcg

SEQ ID NO: 1899482 - DNA, 15 bp, Homo sapiens
cgttgtggcgggcgt

SEQ ID NO: 1899483 - DNA, 15 bp, Homo sapiens
gttgtggcgggcgtc

SEQ ID NO: 1899484 - DNA, 15 bp, Homo sapiens
ttgtggcgggcgtct

SEQ ID NO: 1899485 - DNA, 15 bp, Homo sapiens
tgtggcgggcgtctg

SEQ ID NO: 1899486 - DNA, 15 bp, Homo sapiens
gtggcgggcgtctgt

SEQ ID NO: 1899487 - DNA, 15 bp, Homo sapiens
tggcgggcgtctgta

SEQ ID NO: 1899488 - DNA, 15 bp, Homo sapiens
ggcgggcgtctgtag

SEQ ID NO: 1899489 - DNA, 15 bp, Homo sapiens
gcgggcgtctgtagt

SEQ ID NO: 1899490 - DNA, 15 bp, Homo sapiens
cgggcgtctgtagtc

SEQ ID NO: 1899491 - DNA, 15 bp, Homo sapiens
gggcgtctgtagtcc

SEQ ID NO: 1899492 - DNA, 15 bp, Homo sapiens
ggcgtctgtagtccc

SEQ ID NO: 1899493 - DNA, 15 bp, Homo sapiens
gcgtctgtagtccca

SEQ ID NO: 1899494 - DNA, 15 bp, Homo sapiens
cgtctgtagtcccag

SEQ ID NO: 1899495 - DNA, 15 bp, Homo sapiens
tgaggcaggagaaga

SEQ ID NO: 1899496 - DNA, 15 bp, Homo sapiens
gaggcaggagaagag

SEQ ID NO: 1899497 - DNA, 15 bp, Homo sapiens
aggcaggagaagagc

SEQ ID NO: 1899498 - DNA, 15 bp, Homo sapiens
ggcaggagaagagcg

SEQ ID NO: 1899499 - DNA, 15 bp, Homo sapiens
gcaggagaagagcgt

SEQ ID NO: 1899500 - DNA, 15 bp, Homo sapiens
caggagaagagcgtg

SEQ ID NO: 1899501 - DNA, 15 bp, Homo sapiens
aggagaagagcgtga

SEQ ID NO: 1899502 - DNA, 15 bp, Homo sapiens
ggagaagagcgtgaa

SEQ ID NO: 1899503 - DNA, 15 bp, Homo sapiens
gagaagagcgtgaac

SEQ ID NO: 1899504 - DNA, 15 bp, Homo sapiens
agaagagcgtgaact

SEQ ID NO: 1899505 - DNA, 15 bp, Homo sapiens
gaagagcgtgaactc

SEQ ID NO: 1899506 - DNA, 15 bp, Homo sapiens
aagagcgtgaactcg

SEQ ID NO: 1899507 - DNA, 15 bp, Homo sapiens
agagcgtgaactcgg

SEQ ID NO: 1899508 - DNA, 15 bp, Homo sapiens
gagcgtgaactcggg

SEQ ID NO: 1899509 - DNA, 15 bp, Homo sapiens
agcgtgaactcggga

SEQ ID NO: 1899510 - DNA, 15 bp, Homo sapiens
gcgtgaactcgggag

SEQ ID NO: 1899511 - DNA, 15 bp, Homo sapiens
cgtgaactcgggagg

SEQ ID NO: 1899512 - DNA, 15 bp, Homo sapiens
gtgaactcgggaggc

SEQ ID NO: 1899513 - DNA, 15 bp, Homo sapiens
ctcgggaggcggagc

SEQ ID NO: 1899514 - DNA, 15 bp, Homo sapiens
tcgggaggcggagct

SEQ ID NO: 1899515 - DNA, 15 bp, Homo sapiens
tgcagtgagccgata

SEQ ID NO: 1899516 - DNA, 15 bp, Homo sapiens
gcagtgagccgatat

SEQ ID NO: 1899517 - DNA, 15 bp, Homo sapiens
cagtgagccgatatc

SEQ ID NO: 1899518 - DNA, 15 bp, Homo sapiens
agtgagccgatatcg

SEQ ID NO: 1899519 - DNA, 15 bp, Homo sapiens
tgagccgatatcgca

SEQ ID NO: 1899520 - DNA, 15 bp, Homo sapiens
gagccgatatcgcac

SEQ ID NO: 1899521 - DNA, 15 bp, Homo sapiens
agccgatatcgcacc

SEQ ID NO: 1899522 - DNA, 15 bp, Homo sapiens
gccgatatcgcacca

SEQ ID NO: 1899523 - DNA, 15 bp, Homo sapiens
ccgatatcgcaccac

SEQ ID NO: 1899524 - DNA, 15 bp, Homo sapiens
cgatatcgcaccact

SEQ ID NO: 1899525 - DNA, 15 bp, Homo sapiens
gatatcgcaccactg

SEQ ID NO: 1899526 - DNA, 15 bp, Homo sapiens
atatcgcaccactgc

SEQ ID NO: 1899527 - DNA, 15 bp, Homo sapiens
tatcgcaccactgca

SEQ ID NO: 1899528 - DNA, 15 bp, Homo sapiens
ataaataaataaaac

SEQ ID NO: 1899529 - DNA, 15 bp, Homo sapiens
taaataaataaaact

SEQ ID NO: 1899530 - DNA, 15 bp, Homo sapiens
aaataaataaaactt

SEQ ID NO: 1899531 - DNA, 15 bp, Homo sapiens
aataaataaaacttt

SEQ ID NO: 1899532 - DNA, 15 bp, Homo sapiens
ataaataaaactttg

SEQ ID NO: 1899533 - DNA, 15 bp, Homo sapiens
taaataaaactttgg

SEQ ID NO: 1899534 - DNA, 15 bp, Homo sapiens
aaataaaactttgga

SEQ ID NO: 1899535 - DNA, 15 bp, Homo sapiens
aataaaactttggag

SEQ ID NO: 1899536 - DNA, 15 bp, Homo sapiens
ataaaactttggagc

SEQ ID NO: 1899537 - DNA, 15 bp, Homo sapiens
taaaactttggagcc

SEQ ID NO: 1899538 - DNA, 15 bp, Homo sapiens
aaaactttggagccg

SEQ ID NO: 1899539 - DNA, 15 bp, Homo sapiens
aaactttggagccga

SEQ ID NO: 1899540 - DNA, 15 bp, Homo sapiens
aactttggagccgaa

SEQ ID NO: 1899541 - DNA, 15 bp, Homo sapiens
actttggagccgaag

SEQ ID NO: 1899542 - DNA, 15 bp, Homo sapiens
ctttggagccgaagc

SEQ ID NO: 1899543 - DNA, 15 bp, Homo sapiens
tttggagccgaagca

SEQ ID NO: 1899544 - DNA, 15 bp, Homo sapiens
ttggagccgaagcac

SEQ ID NO: 1899545 - DNA, 15 bp, Homo sapiens
tggagccgaagcact

SEQ ID NO: 1899546 - DNA, 15 bp, Homo sapiens
ggagccgaagcactg

SEQ ID NO: 1899547 - DNA, 15 bp, Homo sapiens
gagccgaagcactga

SEQ ID NO: 1899548 - DNA, 15 bp, Homo sapiens
agccgaagcactgat

SEQ ID NO: 1899549 - DNA, 15 bp, Homo sapiens
gccgaagcactgatg

SEQ ID NO: 1899550 - DNA, 15 bp, Homo sapiens
ccgaagcactgatgt

SEQ ID NO: 1899551 - DNA, 15 bp, Homo sapiens
cgaagcactgatgtt

SEQ ID NO: 1899552 - DNA, 15 bp, Homo sapiens
gaagcactgatgttt

SEQ ID NO: 1899553 - DNA, 15 bp, Homo sapiens
aagcactgatgttta

SEQ ID NO: 1899554 - DNA, 15 bp, Homo sapiens
agcactgatgtttaa

SEQ ID NO: 1899555 - DNA, 15 bp, Homo sapiens
gcactgatgtttaat

SEQ ID NO: 1899556 - DNA, 15 bp, Homo sapiens
cactgatgtttaatc

SEQ ID NO: 1899557 - DNA, 15 bp, Homo sapiens
actgatgtttaatca

SEQ ID NO: 1899558 - DNA, 15 bp, Homo sapiens
ctgatgtttaatcat

SEQ ID NO: 1899559 - DNA, 15 bp, Homo sapiens
tgatgtttaatcata

SEQ ID NO: 1899560 - DNA, 15 bp, Homo sapiens
gatgtttaatcatag

SEQ ID NO: 1899561 - DNA, 15 bp, Homo sapiens
atgtttaatcataga

SEQ ID NO: 1899562 - DNA, 15 bp, Homo sapiens
tgtttaatcatagag

SEQ ID NO: 1899563 - DNA, 15 bp, Homo sapiens
gtttaatcatagagt

SEQ ID NO: 1899564 - DNA, 15 bp, Homo sapiens
tttaatcatagagtg

SEQ ID NO: 1899565 - DNA, 15 bp, Homo sapiens
ttaatcatagagtgc

SEQ ID NO: 1899566 - DNA, 15 bp, Homo sapiens
taatcatagagtgct

SEQ ID NO: 1899567 - DNA, 15 bp, Homo sapiens
aatcatagagtgctt

SEQ ID NO: 1899568 - DNA, 15 bp, Homo sapiens
atcatagagtgctta

SEQ ID NO: 1899569 - DNA, 15 bp, Homo sapiens
tcatagagtgcttac

SEQ ID NO: 1899570 - DNA, 15 bp, Homo sapiens
catagagtgcttact

SEQ ID NO: 1899571 - DNA, 15 bp, Homo sapiens
atagagtgcttacta

SEQ ID NO: 1899572 - DNA, 15 bp, Homo sapiens
tagagtgcttactat

SEQ ID NO: 1899573 - DNA, 15 bp, Homo sapiens
agagtgcttactatg

SEQ ID NO: 1899574 - DNA, 15 bp, Homo sapiens
gagtgcttactatgt

SEQ ID NO: 1899575 - DNA, 15 bp, Homo sapiens
agtgcttactatgtg

SEQ ID NO: 1899576 - DNA, 15 bp, Homo sapiens
gtgcttactatgtgt

SEQ ID NO: 1899577 - DNA, 15 bp, Homo sapiens
tgcttactatgtgtt

SEQ ID NO: 1899578 - DNA, 15 bp, Homo sapiens
gcttactatgtgtta

SEQ ID NO: 1899579 - DNA, 15 bp, Homo sapiens
cttactatgtgttag

SEQ ID NO: 1899580 - DNA, 15 bp, Homo sapiens
ttactatgtgttagg

SEQ ID NO: 1899581 - DNA, 15 bp, Homo sapiens
tactatgtgttaggc

SEQ ID NO: 1899582 - DNA, 15 bp, Homo sapiens
actatgtgttaggca

SEQ ID NO: 1899583 - DNA, 15 bp, Homo sapiens
ctatgtgttaggcac

SEQ ID NO: 1899584 - DNA, 15 bp, Homo sapiens
tatgtgttaggcaca

SEQ ID NO: 1899585 - DNA, 15 bp, Homo sapiens
atgtgttaggcacag

SEQ ID NO: 1899586 - DNA, 15 bp, Homo sapiens
tgtgttaggcacagg

SEQ ID NO: 1899587 - DNA, 15 bp, Homo sapiens
gtgttaggcacaggc

SEQ ID NO: 1899588 - DNA, 15 bp, Homo sapiens
tgttaggcacaggcc

SEQ ID NO: 1899589 - DNA, 15 bp, Homo sapiens
gttaggcacaggcct

SEQ ID NO: 1899590 - DNA, 15 bp, Homo sapiens
ttaggcacaggcctg

SEQ ID NO: 1899591 - DNA, 15 bp, Homo sapiens
taggcacaggcctga

SEQ ID NO: 1899592 - DNA, 15 bp, Homo sapiens
aggcacaggcctgat

SEQ ID NO: 1899593 - DNA, 15 bp, Homo sapiens
ggcacaggcctgatt

SEQ ID NO: 1899594 - DNA, 15 bp, Homo sapiens
gcacaggcctgattg

SEQ ID NO: 1899595 - DNA, 15 bp, Homo sapiens
cacaggcctgattgc

SEQ ID NO: 1899596 - DNA, 15 bp, Homo sapiens
acaggcctgattgcc

SEQ ID NO: 1899597 - DNA, 15 bp, Homo sapiens
caggcctgattgcct

SEQ ID NO: 1899598 - DNA, 15 bp, Homo sapiens
aggcctgattgcctg

SEQ ID NO: 1899599 - DNA, 15 bp, Homo sapiens
ggcctgattgcctga

SEQ ID NO: 1899600 - DNA, 15 bp, Homo sapiens
gcctgattgcctgat

SEQ ID NO: 1899601 - DNA, 15 bp, Homo sapiens
cctgattgcctgatg

SEQ ID NO: 1899602 - DNA, 15 bp, Homo sapiens
ctgattgcctgatgc

SEQ ID NO: 1899603 - DNA, 15 bp, Homo sapiens
tgattgcctgatgct

SEQ ID NO: 1899604 - DNA, 15 bp, Homo sapiens
gattgcctgatgctg

SEQ ID NO: 1899605 - DNA, 15 bp, Homo sapiens
attgcctgatgctgg

SEQ ID NO: 1899606 - DNA, 15 bp, Homo sapiens
ttgcctgatgctggt

SEQ ID NO: 1899607 - DNA, 15 bp, Homo sapiens
tgcctgatgctggtt

SEQ ID NO: 1899608 - DNA, 15 bp, Homo sapiens
gcctgatgctggtta

SEQ ID NO: 1899609 - DNA, 15 bp, Homo sapiens
cctgatgctggttaa

SEQ ID NO: 1899610 - DNA, 15 bp, Homo sapiens
ctgatgctggttaat

SEQ ID NO: 1899611 - DNA, 15 bp, Homo sapiens
tgatgctggttaatt

SEQ ID NO: 1899612 - DNA, 15 bp, Homo sapiens
gatgctggttaattt

SEQ ID NO: 1899613 - DNA, 15 bp, Homo sapiens
atgctggttaatttg

SEQ ID NO: 1899614 - DNA, 15 bp, Homo sapiens
tgctggttaatttgt

SEQ ID NO: 1899615 - DNA, 15 bp, Homo sapiens
gctggttaatttgta

SEQ ID NO: 1899616 - DNA, 15 bp, Homo sapiens
ctggttaatttgtac

SEQ ID NO: 1899617 - DNA, 15 bp, Homo sapiens
tggttaatttgtaca

SEQ ID NO: 1899618 - DNA, 15 bp, Homo sapiens
ggttaatttgtacaa

SEQ ID NO: 1899619 - DNA, 15 bp, Homo sapiens
gttaatttgtacaaa

SEQ ID NO: 1899620 - DNA, 15 bp, Homo sapiens
ttaatttgtacaaag

SEQ ID NO: 1899621 - DNA, 15 bp, Homo sapiens
taatttgtacaaagt

SEQ ID NO: 1899622 - DNA, 15 bp, Homo sapiens
aatttgtacaaagta

SEQ ID NO: 1899623 - DNA, 15 bp, Homo sapiens
atttgtacaaagtaa

SEQ ID NO: 1899624 - DNA, 15 bp, Homo sapiens
tttgtacaaagtaaa

SEQ ID NO: 1899625 - DNA, 15 bp, Homo sapiens
ttgtacaaagtaaat

SEQ ID NO: 1899626 - DNA, 15 bp, Homo sapiens
tgtacaaagtaaatc

SEQ ID NO: 1899627 - DNA, 15 bp, Homo sapiens
gtacaaagtaaatca

SEQ ID NO: 1899628 - DNA, 15 bp, Homo sapiens
tacaaagtaaatcag

SEQ ID NO: 1899629 - DNA, 15 bp, Homo sapiens
acaaagtaaatcagt

SEQ ID NO: 1899630 - DNA, 15 bp, Homo sapiens
caaagtaaatcagtg

SEQ ID NO: 1899631 - DNA, 15 bp, Homo sapiens
aaagtaaatcagtgc

SEQ ID NO: 1899632 - DNA, 15 bp, Homo sapiens
aagtaaatcagtgca

SEQ ID NO: 1899633 - DNA, 15 bp, Homo sapiens
agtaaatcagtgcat

SEQ ID NO: 1899634 - DNA, 15 bp, Homo sapiens
gtaaatcagtgcata

SEQ ID NO: 1899635 - DNA, 15 bp, Homo sapiens
taaatcagtgcatat

SEQ ID NO: 1899636 - DNA, 15 bp, Homo sapiens
aaatcagtgcatatg

SEQ ID NO: 1899637 - DNA, 15 bp, Homo sapiens
aatcagtgcatatgc

SEQ ID NO: 1899638 - DNA, 15 bp, Homo sapiens
atcagtgcatatgcc

SEQ ID NO: 1899639 - DNA, 15 bp, Homo sapiens
tcagtgcatatgccc

SEQ ID NO: 1899640 - DNA, 15 bp, Homo sapiens
cagtgcatatgccct

SEQ ID NO: 1899641 - DNA, 15 bp, Homo sapiens
agtgcatatgccctc

SEQ ID NO: 1899642 - DNA, 15 bp, Homo sapiens
gtgcatatgccctct

SEQ ID NO: 1899643 - DNA, 15 bp, Homo sapiens
tgcatatgccctctg

SEQ ID NO: 1899644 - DNA, 15 bp, Homo sapiens
gcatatgccctctgc

SEQ ID NO: 1899645 - DNA, 15 bp, Homo sapiens
catatgccctctgcc

SEQ ID NO: 1899646 - DNA, 15 bp, Homo sapiens
atatgccctctgccc

SEQ ID NO: 1899647 - DNA, 15 bp, Homo sapiens
tatgccctctgccct

SEQ ID NO: 1899648 - DNA, 15 bp, Homo sapiens
atgccctctgcccta

SEQ ID NO: 1899649 - DNA, 15 bp, Homo sapiens
tgccctctgccctag

SEQ ID NO: 1899650 - DNA, 15 bp, Homo sapiens
gccctctgccctagg

SEQ ID NO: 1899651 - DNA, 15 bp, Homo sapiens
ccctctgccctaggg

SEQ ID NO: 1899652 - DNA, 15 bp, Homo sapiens
cctctgccctagggg

SEQ ID NO: 1899653 - DNA, 15 bp, Homo sapiens
ctctgccctagggga

SEQ ID NO: 1899654 - DNA, 15 bp, Homo sapiens
tctgccctaggggag

SEQ ID NO: 1899655 - DNA, 15 bp, Homo sapiens
ctgccctaggggagt

SEQ ID NO: 1899656 - DNA, 15 bp, Homo sapiens
tgccctaggggagtt

SEQ ID NO: 1899657 - DNA, 15 bp, Homo sapiens
gccctaggggagtta

SEQ ID NO: 1899658 - DNA, 15 bp, Homo sapiens
ccctaggggagttat

SEQ ID NO: 1899659 - DNA, 15 bp, Homo sapiens
cctaggggagttatt

SEQ ID NO: 1899660 - DNA, 15 bp, Homo sapiens
ctaggggagttatta

SEQ ID NO: 1899661 - DNA, 15 bp, Homo sapiens
taggggagttattaa

SEQ ID NO: 1899662 - DNA, 15 bp, Homo sapiens
aggggagttattaac

SEQ ID NO: 1899663 - DNA, 15 bp, Homo sapiens
ggggagttattaact

SEQ ID NO: 1899664 - DNA, 15 bp, Homo sapiens
gggagttattaactg

SEQ ID NO: 1899665 - DNA, 15 bp, Homo sapiens
ggagttattaactgg

SEQ ID NO: 1899666 - DNA, 15 bp, Homo sapiens
gagttattaactgga

SEQ ID NO: 1899667 - DNA, 15 bp, Homo sapiens
agttattaactggag

SEQ ID NO: 1899668 - DNA, 15 bp, Homo sapiens
gttattaactggagt

SEQ ID NO: 1899669 - DNA, 15 bp, Homo sapiens
ttattaactggagtc

SEQ ID NO: 1899670 - DNA, 15 bp, Homo sapiens
tattaactggagtct

SEQ ID NO: 1899671 - DNA, 15 bp, Homo sapiens
attaactggagtctg

SEQ ID NO: 1899672 - DNA, 15 bp, Homo sapiens
ttaactggagtctga

SEQ ID NO: 1899673 - DNA, 15 bp, Homo sapiens
taactggagtctgac

SEQ ID NO: 1899674 - DNA, 15 bp, Homo sapiens
aactggagtctgaca

SEQ ID NO: 1899675 - DNA, 15 bp, Homo sapiens
actggagtctgacat

SEQ ID NO: 1899676 - DNA, 15 bp, Homo sapiens
ctggagtctgacatt

SEQ ID NO: 1899677 - DNA, 15 bp, Homo sapiens
tggagtctgacattg

SEQ ID NO: 1899678 - DNA, 15 bp, Homo sapiens
ggagtctgacattgt

SEQ ID NO: 1899679 - DNA, 15 bp, Homo sapiens
gagtctgacattgta

SEQ ID NO: 1899680 - DNA, 15 bp, Homo sapiens
agtctgacattgtac

SEQ ID NO: 1899681 - DNA, 15 bp, Homo sapiens
gtctgacattgtaca

SEQ ID NO: 1899682 - DNA, 15 bp, Homo sapiens
tctgacattgtacaa

SEQ ID NO: 1899683 - DNA, 15 bp, Homo sapiens
ctgacattgtacaaa

SEQ ID NO: 1899684 - DNA, 15 bp, Homo sapiens
tgacattgtacaaag

SEQ ID NO: 1899685 - DNA, 15 bp, Homo sapiens
gacattgtacaaagg

SEQ ID NO: 1899686 - DNA, 15 bp, Homo sapiens
acattgtacaaaggt

SEQ ID NO: 1899687 - DNA, 15 bp, Homo sapiens
cattgtacaaaggta

SEQ ID NO: 1899688 - DNA, 15 bp, Homo sapiens
attgtacaaaggtag

SEQ ID NO: 1899689 - DNA, 15 bp, Homo sapiens
ttgtacaaaggtagg

SEQ ID NO: 1899690 - DNA, 15 bp, Homo sapiens
tgtacaaaggtaggt

SEQ ID NO: 1899691 - DNA, 15 bp, Homo sapiens
gtacaaaggtaggta

SEQ ID NO: 1899692 - DNA, 15 bp, Homo sapiens
tacaaaggtaggtat

SEQ ID NO: 1899693 - DNA, 15 bp, Homo sapiens
acaaaggtaggtatc

SEQ ID NO: 1899694 - DNA, 15 bp, Homo sapiens
caaaggtaggtatcc

SEQ ID NO: 1899695 - DNA, 15 bp, Homo sapiens
aaaggtaggtatcct

SEQ ID NO: 1899696 - DNA, 15 bp, Homo sapiens
aaggtaggtatcctg

SEQ ID NO: 1899697 - DNA, 15 bp, Homo sapiens
aggtaggtatcctga

SEQ ID NO: 1899698 - DNA, 15 bp, Homo sapiens
ggtaggtatcctgac

SEQ ID NO: 1899699 - DNA, 15 bp, Homo sapiens
gtaggtatcctgact

SEQ ID NO: 1899700 - DNA, 15 bp, Homo sapiens
taggtatcctgacta

SEQ ID NO: 1899701 - DNA, 15 bp, Homo sapiens
aggtatcctgactag

SEQ ID NO: 1899702 - DNA, 15 bp, Homo sapiens
ggtatcctgactagt

SEQ ID NO: 1899703 - DNA, 15 bp, Homo sapiens
gtatcctgactagtt

SEQ ID NO: 1899704 - DNA, 15 bp, Homo sapiens
tatcctgactagttt

SEQ ID NO: 1899705 - DNA, 15 bp, Homo sapiens
atcctgactagtttg

SEQ ID NO: 1899706 - DNA, 15 bp, Homo sapiens
tcctgactagtttga

SEQ ID NO: 1899707 - DNA, 15 bp, Homo sapiens
cctgactagtttgat

SEQ ID NO: 1899708 - DNA, 15 bp, Homo sapiens
ctgactagtttgatt

SEQ ID NO: 1899709 - DNA, 15 bp, Homo sapiens
tgactagtttgattt

SEQ ID NO: 1899710 - DNA, 15 bp, Homo sapiens
gactagtttgatttg

SEQ ID NO: 1899711 - DNA, 15 bp, Homo sapiens
actagtttgatttgg

SEQ ID NO: 1899712 - DNA, 15 bp, Homo sapiens
ctagtttgatttggt

SEQ ID NO: 1899713 - DNA, 15 bp, Homo sapiens
tagtttgatttggta

SEQ ID NO: 1899714 - DNA, 15 bp, Homo sapiens
agtttgatttggtac

SEQ ID NO: 1899715 - DNA, 15 bp, Homo sapiens
gtttgatttggtact

SEQ ID NO: 1899716 - DNA, 15 bp, Homo sapiens
tttgatttggtactt

SEQ ID NO: 1899717 - DNA, 15 bp, Homo sapiens
ttgatttggtacttt

SEQ ID NO: 1899718 - DNA, 15 bp, Homo sapiens
tgatttggtactttg

SEQ ID NO: 1899719 - DNA, 15 bp, Homo sapiens
gatttggtactttgg

SEQ ID NO: 1899720 - DNA, 15 bp, Homo sapiens
atttggtactttggg

SEQ ID NO: 1899721 - DNA, 15 bp, Homo sapiens
tttggtactttgggt

SEQ ID NO: 1899722 - DNA, 15 bp, Homo sapiens
ttggtactttgggtg

SEQ ID NO: 1899723 - DNA, 15 bp, Homo sapiens
tggtactttgggtga

SEQ ID NO: 1899724 - DNA, 15 bp, Homo sapiens
ggtactttgggtgaa

SEQ ID NO: 1899725 - DNA, 15 bp, Homo sapiens
gtactttgggtgaaa

SEQ ID NO: 1899726 - DNA, 15 bp, Homo sapiens
tactttgggtgaaaa

SEQ ID NO: 1899727 - DNA, 15 bp, Homo sapiens
actttgggtgaaaaa

SEQ ID NO: 1899728 - DNA, 15 bp, Homo sapiens
ctttgggtgaaaaaa

SEQ ID NO: 1899729 - DNA, 15 bp, Homo sapiens
tttgggtgaaaaaag

SEQ ID NO: 1899730 - DNA, 15 bp, Homo sapiens
ttgggtgaaaaaagt

SEQ ID NO: 1899731 - DNA, 15 bp, Homo sapiens
tgggtgaaaaaagta

SEQ ID NO: 1899732 - DNA, 15 bp, Homo sapiens
gggtgaaaaaagtat

SEQ ID NO: 1899733 - DNA, 15 bp, Homo sapiens
ggtgaaaaaagtata

SEQ ID NO: 1899734 - DNA, 15 bp, Homo sapiens
gtgaaaaaagtatag

SEQ ID NO: 1899735 - DNA, 15 bp, Homo sapiens
tgaaaaaagtatagt

SEQ ID NO: 1899736 - DNA, 15 bp, Homo sapiens
gaaaaaagtatagtg

SEQ ID NO: 1899737 - DNA, 15 bp, Homo sapiens
aaaaaagtatagtgt

SEQ ID NO: 1899738 - DNA, 15 bp, Homo sapiens
aaaaagtatagtgtg

SEQ ID NO: 1899739 - DNA, 15 bp, Homo sapiens
aaaagtatagtgtgc

SEQ ID NO: 1899740 - DNA, 15 bp, Homo sapiens
aaagtatagtgtgct

SEQ ID NO: 1899741 - DNA, 15 bp, Homo sapiens
aagtatagtgtgctt

SEQ ID NO: 1899742 - DNA, 15 bp, Homo sapiens
agtatagtgtgctta

SEQ ID NO: 1899743 - DNA, 15 bp, Homo sapiens
gtatagtgtgcttaa

SEQ ID NO: 1899744 - DNA, 15 bp, Homo sapiens
tatagtgtgcttaag

SEQ ID NO: 1899745 - DNA, 15 bp, Homo sapiens
atagtgtgcttaagt

SEQ ID NO: 1899746 - DNA, 15 bp, Homo sapiens
tagtgtgcttaagtg

SEQ ID NO: 1899747 - DNA, 15 bp, Homo sapiens
agtgtgcttaagtgc

SEQ ID NO: 1899748 - DNA, 15 bp, Homo sapiens
gtgtgcttaagtgca

SEQ ID NO: 1899749 - DNA, 15 bp, Homo sapiens
tgtgcttaagtgcag

SEQ ID NO: 1899750 - DNA, 15 bp, Homo sapiens
gtgcttaagtgcaga

SEQ ID NO: 1899751 - DNA, 15 bp, Homo sapiens
tgcttaagtgcagaa

SEQ ID NO: 1899752 - DNA, 15 bp, Homo sapiens
gcttaagtgcagaag

SEQ ID NO: 1899753 - DNA, 15 bp, Homo sapiens
cttaagtgcagaagt

SEQ ID NO: 1899754 - DNA, 15 bp, Homo sapiens
ttaagtgcagaagtg

SEQ ID NO: 1899755 - DNA, 15 bp, Homo sapiens
taagtgcagaagtgt

SEQ ID NO: 1899756 - DNA, 15 bp, Homo sapiens
aagtgcagaagtgtt

SEQ ID NO: 1899757 - DNA, 15 bp, Homo sapiens
agtgcagaagtgttt

SEQ ID NO: 1899758 - DNA, 15 bp, Homo sapiens
gtgcagaagtgtttt

SEQ ID NO: 1899759 - DNA, 15 bp, Homo sapiens
tgcagaagtgttttt

SEQ ID NO: 1899760 - DNA, 15 bp, Homo sapiens
gcagaagtgtttttt

SEQ ID NO: 1899761 - DNA, 15 bp, Homo sapiens
cagaagtgttttttg

SEQ ID NO: 1899762 - DNA, 15 bp, Homo sapiens
agaagtgttttttga

SEQ ID NO: 1899763 - DNA, 15 bp, Homo sapiens
gaagtgttttttgag

SEQ ID NO: 1899764 - DNA, 15 bp, Homo sapiens
aagtgttttttgagg

SEQ ID NO: 1899765 - DNA, 15 bp, Homo sapiens
agtgttttttgagga

SEQ ID NO: 1899766 - DNA, 15 bp, Homo sapiens
gtgttttttgaggat

SEQ ID NO: 1899767 - DNA, 15 bp, Homo sapiens
tgttttttgaggatt

SEQ ID NO: 1899768 - DNA, 15 bp, Homo sapiens
gttttttgaggattt

SEQ ID NO: 1899769 - DNA, 15 bp, Homo sapiens
ttttttgaggatttt

SEQ ID NO: 1899770 - DNA, 15 bp, Homo sapiens
tttttgaggattttt

SEQ ID NO: 1899771 - DNA, 15 bp, Homo sapiens
ttttgaggatttttg

SEQ ID NO: 1899772 - DNA, 15 bp, Homo sapiens
tttgaggatttttga

SEQ ID NO: 1899773 - DNA, 15 bp, Homo sapiens
ttgaggatttttgat

SEQ ID NO: 1899774 - DNA, 15 bp, Homo sapiens
tgaggatttttgatt

SEQ ID NO: 1899775 - DNA, 15 bp, Homo sapiens
gaggatttttgattg

SEQ ID NO: 1899776 - DNA, 15 bp, Homo sapiens
aggatttttgattgg

SEQ ID NO: 1899777 - DNA, 15 bp, Homo sapiens
ggatttttgattgga

SEQ ID NO: 1899778 - DNA, 15 bp, Homo sapiens
gatttttgattggat

SEQ ID NO: 1899779 - DNA, 15 bp, Homo sapiens
atttttgattggata

SEQ ID NO: 1899780 - DNA, 15 bp, Homo sapiens
tttttgattggatac

SEQ ID NO: 1899781 - DNA, 15 bp, Homo sapiens
ttttgattggataca

SEQ ID NO: 1899782 - DNA, 15 bp, Homo sapiens
tttgattggatacaa

SEQ ID NO: 1899783 - DNA, 15 bp, Homo sapiens
ttgattggatacaaa

SEQ ID NO: 1899784 - DNA, 15 bp, Homo sapiens
tgattggatacaaac

SEQ ID NO: 1899785 - DNA, 15 bp, Homo sapiens
gattggatacaaacc

SEQ ID NO: 1899786 - DNA, 15 bp, Homo sapiens
attggatacaaacca

SEQ ID NO: 1899787 - DNA, 15 bp, Homo sapiens
ttggatacaaaccac

SEQ ID NO: 1899788 - DNA, 15 bp, Homo sapiens
tggatacaaaccacc

SEQ ID NO: 1899789 - DNA, 15 bp, Homo sapiens
ggatacaaaccacca

SEQ ID NO: 1899790 - DNA, 15 bp, Homo sapiens
gatacaaaccaccac

SEQ ID NO: 1899791 - DNA, 15 bp, Homo sapiens
atacaaaccaccact

SEQ ID NO: 1899792 - DNA, 15 bp, Homo sapiens
tacaaaccaccactc

SEQ ID NO: 1899793 - DNA, 15 bp, Homo sapiens
acaaaccaccactca

SEQ ID NO: 1899794 - DNA, 15 bp, Homo sapiens
caaaccaccactcat

SEQ ID NO: 1899795 - DNA, 15 bp, Homo sapiens
aaaccaccactcata

SEQ ID NO: 1899796 - DNA, 15 bp, Homo sapiens
aaccaccactcatat

SEQ ID NO: 1899797 - DNA, 15 bp, Homo sapiens
accaccactcatatt

SEQ ID NO: 1899798 - DNA, 15 bp, Homo sapiens
ccaccactcatattt

SEQ ID NO: 1899799 - DNA, 15 bp, Homo sapiens
caccactcatatttt

SEQ ID NO: 1899800 - DNA, 15 bp, Homo sapiens
accactcatatttta

SEQ ID NO: 1899801 - DNA, 15 bp, Homo sapiens
ccactcatattttat

SEQ ID NO: 1899802 - DNA, 15 bp, Homo sapiens
cactcatattttatg

SEQ ID NO: 1899803 - DNA, 15 bp, Homo sapiens
actcatattttatgt

SEQ ID NO: 1899804 - DNA, 15 bp, Homo sapiens
ctcatattttatgtc

SEQ ID NO: 1899805 - DNA, 15 bp, Homo sapiens
tcatattttatgtct

SEQ ID NO: 1899806 - DNA, 15 bp, Homo sapiens
catattttatgtctt

SEQ ID NO: 1899807 - DNA, 15 bp, Homo sapiens
atattttatgtcttt

SEQ ID NO: 1899808 - DNA, 15 bp, Homo sapiens
tattttatgtctttg

SEQ ID NO: 1899809 - DNA, 15 bp, Homo sapiens
attttatgtctttgg

SEQ ID NO: 1899810 - DNA, 15 bp, Homo sapiens
ttttatgtctttggc

SEQ ID NO: 1899811 - DNA, 15 bp, Homo sapiens
tttatgtctttggca

SEQ ID NO: 1899812 - DNA, 15 bp, Homo sapiens
ttatgtctttggcac

SEQ ID NO: 1899813 - DNA, 15 bp, Homo sapiens
tatgtctttggcact

SEQ ID NO: 1899814 - DNA, 15 bp, Homo sapiens
atgtctttggcactt

SEQ ID NO: 1899815 - DNA, 15 bp, Homo sapiens
tgtctttggcactta

SEQ ID NO: 1899816 - DNA, 15 bp, Homo sapiens
gtctttggcacttaa

SEQ ID NO: 1899817 - DNA, 15 bp, Homo sapiens
tctttggcacttaaa

SEQ ID NO: 1899818 - DNA, 15 bp, Homo sapiens
ctttggcacttaaaa

SEQ ID NO: 1899819 - DNA, 15 bp, Homo sapiens
tttggcacttaaaaa

SEQ ID NO: 1899820 - DNA, 15 bp, Homo sapiens
ttggcacttaaaaat

SEQ ID NO: 1899821 - DNA, 15 bp, Homo sapiens
tggcacttaaaaatt

SEQ ID NO: 1899822 - DNA, 15 bp, Homo sapiens
ggcacttaaaaattt

SEQ ID NO: 1899823 - DNA, 15 bp, Homo sapiens
gcacttaaaaatttc

SEQ ID NO: 1899824 - DNA, 15 bp, Homo sapiens
cacttaaaaatttca

SEQ ID NO: 1899825 - DNA, 15 bp, Homo sapiens
acttaaaaatttcac

SEQ ID NO: 1899826 - DNA, 15 bp, Homo sapiens
cttaaaaatttcacc

SEQ ID NO: 1899827 - DNA, 15 bp, Homo sapiens
ttaaaaatttcacca

SEQ ID NO: 1899828 - DNA, 15 bp, Homo sapiens
taaaaatttcaccat

SEQ ID NO: 1899829 - DNA, 15 bp, Homo sapiens
aaaaatttcaccata

SEQ ID NO: 1899830 - DNA, 15 bp, Homo sapiens
aaaatttcaccataa

SEQ ID NO: 1899831 - DNA, 15 bp, Homo sapiens
aaatttcaccataac

SEQ ID NO: 1899832 - DNA, 15 bp, Homo sapiens
aatttcaccataact

SEQ ID NO: 1899833 - DNA, 15 bp, Homo sapiens
atttcaccataactt

SEQ ID NO: 1899834 - DNA, 15 bp, Homo sapiens
tttcaccataacttt

SEQ ID NO: 1899835 - DNA, 15 bp, Homo sapiens
ttcaccataactttt

SEQ ID NO: 1899836 - DNA, 15 bp, Homo sapiens
tcaccataacttttg

SEQ ID NO: 1899837 - DNA, 15 bp, Homo sapiens
caccataacttttga

SEQ ID NO: 1899838 - DNA, 15 bp, Homo sapiens
accataacttttgag

SEQ ID NO: 1899839 - DNA, 15 bp, Homo sapiens
ccataacttttgagt

SEQ ID NO: 1899840 - DNA, 15 bp, Homo sapiens
cataacttttgagtc

SEQ ID NO: 1899841 - DNA, 15 bp, Homo sapiens
ataacttttgagtca

SEQ ID NO: 1899842 - DNA, 15 bp, Homo sapiens
taacttttgagtcat

SEQ ID NO: 1899843 - DNA, 15 bp, Homo sapiens
aacttttgagtcatt

SEQ ID NO: 1899844 - DNA, 15 bp, Homo sapiens
acttttgagtcattt

SEQ ID NO: 1899845 - DNA, 15 bp, Homo sapiens
cttttgagtcattta

SEQ ID NO: 1899846 - DNA, 15 bp, Homo sapiens
ttttgagtcatttat

SEQ ID NO: 1899847 - DNA, 15 bp, Homo sapiens
tttgagtcatttata

SEQ ID NO: 1899848 - DNA, 15 bp, Homo sapiens
ttgagtcatttataa

SEQ ID NO: 1899849 - DNA, 15 bp, Homo sapiens
tgagtcatttataaa

SEQ ID NO: 1899850 - DNA, 15 bp, Homo sapiens
gagtcatttataaaa

SEQ ID NO: 1899851 - DNA, 15 bp, Homo sapiens
agtcatttataaaaa

SEQ ID NO: 1899852 - DNA, 15 bp, Homo sapiens
gtcatttataaaaac

SEQ ID NO: 1899853 - DNA, 15 bp, Homo sapiens
tcatttataaaaacc

SEQ ID NO: 1899854 - DNA, 15 bp, Homo sapiens
catttataaaaacca

SEQ ID NO: 1899855 - DNA, 15 bp, Homo sapiens
atttataaaaaccac

SEQ ID NO: 1899856 - DNA, 15 bp, Homo sapiens
tttataaaaaccact

SEQ ID NO: 1899857 - DNA, 15 bp, Homo sapiens
ttataaaaaccactg

SEQ ID NO: 1899858 - DNA, 15 bp, Homo sapiens
tataaaaaccactga

SEQ ID NO: 1899859 - DNA, 15 bp, Homo sapiens
ataaaaaccactgaa

SEQ ID NO: 1899860 - DNA, 15 bp, Homo sapiens
taaaaaccactgaaa

SEQ ID NO: 1899861 - DNA, 15 bp, Homo sapiens
aaaaaccactgaaag

SEQ ID NO: 1899862 - DNA, 15 bp, Homo sapiens
aaaaccactgaaaga

SEQ ID NO: 1899863 - DNA, 15 bp, Homo sapiens
aaaccactgaaagag

SEQ ID NO: 1899864 - DNA, 15 bp, Homo sapiens
aaccactgaaagagt

SEQ ID NO: 1899865 - DNA, 15 bp, Homo sapiens
accactgaaagagta

SEQ ID NO: 1899866 - DNA, 15 bp, Homo sapiens
ccactgaaagagtac

SEQ ID NO: 1899867 - DNA, 15 bp, Homo sapiens
cactgaaagagtact

SEQ ID NO: 1899868 - DNA, 15 bp, Homo sapiens
actgaaagagtactt

SEQ ID NO: 1899869 - DNA, 15 bp, Homo sapiens
ctgaaagagtacttg

SEQ ID NO: 1899870 - DNA, 15 bp, Homo sapiens
tgaaagagtacttga

SEQ ID NO: 1899871 - DNA, 15 bp, Homo sapiens
gaaagagtacttgag

SEQ ID NO: 1899872 - DNA, 15 bp, Homo sapiens
aaagagtacttgagg

SEQ ID NO: 1899873 - DNA, 15 bp, Homo sapiens
aagagtacttgaggg

SEQ ID NO: 1899874 - DNA, 15 bp, Homo sapiens
agagtacttgaggga

SEQ ID NO: 1899875 - DNA, 15 bp, Homo sapiens
gagtacttgagggac

SEQ ID NO: 1899876 - DNA, 15 bp, Homo sapiens
agtacttgagggaca

SEQ ID NO: 1899877 - DNA, 15 bp, Homo sapiens
gtacttgagggacat

SEQ ID NO: 1899878 - DNA, 15 bp, Homo sapiens
tacttgagggacatc

SEQ ID NO: 1899879 - DNA, 15 bp, Homo sapiens
acttgagggacatcc

SEQ ID NO: 1899880 - DNA, 15 bp, Homo sapiens
cttgagggacatccc

SEQ ID NO: 1899881 - DNA, 15 bp, Homo sapiens
ttgagggacatcccc

SEQ ID NO: 1899882 - DNA, 15 bp, Homo sapiens
tgagggacatccccg

SEQ ID NO: 1899883 - DNA, 15 bp, Homo sapiens
gagggacatccccga

SEQ ID NO: 1899884 - DNA, 15 bp, Homo sapiens
agggacatccccgaa

SEQ ID NO: 1899885 - DNA, 15 bp, Homo sapiens
gggacatccccgaat

SEQ ID NO: 1899886 - DNA, 15 bp, Homo sapiens
ggacatccccgaatc

SEQ ID NO: 1899887 - DNA, 15 bp, Homo sapiens
gacatccccgaatcc

SEQ ID NO: 1899888 - DNA, 15 bp, Homo sapiens
acatccccgaatcct

SEQ ID NO: 1899889 - DNA, 15 bp, Homo sapiens
catccccgaatcctg

SEQ ID NO: 1899890 - DNA, 15 bp, Homo sapiens
atccccgaatcctga

SEQ ID NO: 1899891 - DNA, 15 bp, Homo sapiens
tccccgaatcctgaa

SEQ ID NO: 1899892 - DNA, 15 bp, Homo sapiens
ccccgaatcctgaag

SEQ ID NO: 1899893 - DNA, 15 bp, Homo sapiens
cccgaatcctgaaga

SEQ ID NO: 1899894 - DNA, 15 bp, Homo sapiens
ccgaatcctgaagaa

SEQ ID NO: 1899895 - DNA, 15 bp, Homo sapiens
cgaatcctgaagaac

SEQ ID NO: 1899896 - DNA, 15 bp, Homo sapiens
gaatcctgaagaact

SEQ ID NO: 1899897 - DNA, 15 bp, Homo sapiens
aatcctgaagaactt

SEQ ID NO: 1899898 - DNA, 15 bp, Homo sapiens
atcctgaagaacttc

SEQ ID NO: 1899899 - DNA, 15 bp, Homo sapiens
tcctgaagaacttct

SEQ ID NO: 1899900 - DNA, 15 bp, Homo sapiens
cctgaagaacttctg

SEQ ID NO: 1899901 - DNA, 15 bp, Homo sapiens
ctgaagaacttctgg

SEQ ID NO: 1899902 - DNA, 15 bp, Homo sapiens
tgaagaacttctggt

SEQ ID NO: 1899903 - DNA, 15 bp, Homo sapiens
gaagaacttctggtg

SEQ ID NO: 1899904 - DNA, 15 bp, Homo sapiens
aagaacttctggtgt

SEQ ID NO: 1899905 - DNA, 15 bp, Homo sapiens
agaacttctggtgtt

SEQ ID NO: 1899906 - DNA, 15 bp, Homo sapiens
gaacttctggtgttc

SEQ ID NO: 1899907 - DNA, 15 bp, Homo sapiens
acttctggtgttctg

SEQ ID NO: 1899908 - DNA, 15 bp, Homo sapiens
cttctggtgttctgg

SEQ ID NO: 1899909 - DNA, 15 bp, Homo sapiens
ttctggtgttctgga

SEQ ID NO: 1899910 - DNA, 15 bp, Homo sapiens
tctggtgttctggag

SEQ ID NO: 1899911 - DNA, 15 bp, Homo sapiens
ctggtgttctggagc

SEQ ID NO: 1899912 - DNA, 15 bp, Homo sapiens
tggtgttctggagca

SEQ ID NO: 1899913 - DNA, 15 bp, Homo sapiens
ggtgttctggagcag

SEQ ID NO: 1899914 - DNA, 15 bp, Homo sapiens
gtgttctggagcagc

SEQ ID NO: 1899915 - DNA, 15 bp, Homo sapiens
tgttctggagcagcc

SEQ ID NO: 1899916 - DNA, 15 bp, Homo sapiens
gttctggagcagcct

SEQ ID NO: 1899917 - DNA, 15 bp, Homo sapiens
ttctggagcagcctc

SEQ ID NO: 1899918 - DNA, 15 bp, Homo sapiens
tctggagcagcctca

SEQ ID NO: 1899919 - DNA, 15 bp, Homo sapiens
ctggagcagcctcag

SEQ ID NO: 1899920 - DNA, 15 bp, Homo sapiens
tggagcagcctcagt

SEQ ID NO: 1899921 - DNA, 15 bp, Homo sapiens
ggagcagcctcagtg

SEQ ID NO: 1899922 - DNA, 15 bp, Homo sapiens
gagcagcctcagtga

SEQ ID NO: 1899923 - DNA, 15 bp, Homo sapiens
agcagcctcagtgag

SEQ ID NO: 1899924 - DNA, 15 bp, Homo sapiens
gcagcctcagtgaga

SEQ ID NO: 1899925 - DNA, 15 bp, Homo sapiens
cagcctcagtgagat

SEQ ID NO: 1899926 - DNA, 15 bp, Homo sapiens
agcctcagtgagatc

SEQ ID NO: 1899927 - DNA, 15 bp, Homo sapiens
gcctcagtgagatcc

SEQ ID NO: 1899928 - DNA, 15 bp, Homo sapiens
cctcagtgagatcca

SEQ ID NO: 1899929 - DNA, 15 bp, Homo sapiens
ctcagtgagatccag

SEQ ID NO: 1899930 - DNA, 15 bp, Homo sapiens
tcagtgagatccagg

SEQ ID NO: 1899931 - DNA, 15 bp, Homo sapiens
cagtgagatccagga

SEQ ID NO: 1899932 - DNA, 15 bp, Homo sapiens
agtgagatccaggag

SEQ ID NO: 1899933 - DNA, 15 bp, Homo sapiens
gtgagatccaggagg

SEQ ID NO: 1899934 - DNA, 15 bp, Homo sapiens
tgagatccaggagga

SEQ ID NO: 1899935 - DNA, 15 bp, Homo sapiens
gagatccaggaggat

SEQ ID NO: 1899936 - DNA, 15 bp, Homo sapiens
agatccaggaggatg

SEQ ID NO: 1899937 - DNA, 15 bp, Homo sapiens
gatccaggaggatgg

SEQ ID NO: 1899938 - DNA, 15 bp, Homo sapiens
atccaggaggatggc

SEQ ID NO: 1899939 - DNA, 15 bp, Homo sapiens
tccaggaggatggca

SEQ ID NO: 1899940 - DNA, 15 bp, Homo sapiens
ccaggaggatggcat

SEQ ID NO: 1899941 - DNA, 15 bp, Homo sapiens
caggaggatggcatt

SEQ ID NO: 1899942 - DNA, 15 bp, Homo sapiens
aggaggatggcattg

SEQ ID NO: 1899943 - DNA, 15 bp, Homo sapiens
ggaggatggcattgc

SEQ ID NO: 1899944 - DNA, 15 bp, Homo sapiens
gaggatggcattgct

SEQ ID NO: 1899945 - DNA, 15 bp, Homo sapiens
aggatggcattgctg

SEQ ID NO: 1899946 - DNA, 15 bp, Homo sapiens
ggatggcattgctgg

SEQ ID NO: 1899947 - DNA, 15 bp, Homo sapiens
gatggcattgctggg

SEQ ID NO: 1899948 - DNA, 15 bp, Homo sapiens
atggcattgctgggc

SEQ ID NO: 1899949 - DNA, 15 bp, Homo sapiens
tggcattgctgggct

SEQ ID NO: 1899950 - DNA, 15 bp, Homo sapiens
ggcattgctgggctg

SEQ ID NO: 1899951 - DNA, 15 bp, Homo sapiens
gcattgctgggctgg

SEQ ID NO: 1899952 - DNA, 15 bp, Homo sapiens
cattgctgggctggc

SEQ ID NO: 1899953 - DNA, 15 bp, Homo sapiens
attgctgggctggcc

SEQ ID NO: 1899954 - DNA, 15 bp, Homo sapiens
ttgctgggctggccc

SEQ ID NO: 1899955 - DNA, 15 bp, Homo sapiens
tgctgggctggccca

SEQ ID NO: 1899956 - DNA, 15 bp, Homo sapiens
gctgggctggcccag

SEQ ID NO: 1899957 - DNA, 15 bp, Homo sapiens
ctgggctggcccagc

SEQ ID NO: 1899958 - DNA, 15 bp, Homo sapiens
tgggctggcccagcc

SEQ ID NO: 1899959 - DNA, 15 bp, Homo sapiens
gggctggcccagccc

SEQ ID NO: 1899960 - DNA, 15 bp, Homo sapiens
ggctggcccagccct

SEQ ID NO: 1899961 - DNA, 15 bp, Homo sapiens
gctggcccagccctt

SEQ ID NO: 1899962 - DNA, 15 bp, Homo sapiens
ctggcccagccctta

SEQ ID NO: 1899963 - DNA, 15 bp, Homo sapiens
tggcccagcccttat

SEQ ID NO: 1899964 - DNA, 15 bp, Homo sapiens
ggcccagcccttatt

SEQ ID NO: 1899965 - DNA, 15 bp, Homo sapiens
gcccagcccttattg

SEQ ID NO: 1899966 - DNA, 15 bp, Homo sapiens
cccagcccttattga

SEQ ID NO: 1899967 - DNA, 15 bp, Homo sapiens
ccagcccttattgat

SEQ ID NO: 1899968 - DNA, 15 bp, Homo sapiens
cagcccttattgatt

SEQ ID NO: 1899969 - DNA, 15 bp, Homo sapiens
agcccttattgatta

SEQ ID NO: 1899970 - DNA, 15 bp, Homo sapiens
gcccttattgattat

SEQ ID NO: 1899971 - DNA, 15 bp, Homo sapiens
cccttattgattatg

SEQ ID NO: 1899972 - DNA, 15 bp, Homo sapiens
ccttattgattatgg

SEQ ID NO: 1899973 - DNA, 15 bp, Homo sapiens
cttattgattatggt

SEQ ID NO: 1899974 - DNA, 15 bp, Homo sapiens
ttattgattatggtg

SEQ ID NO: 1899975 - DNA, 15 bp, Homo sapiens
tattgattatggtgt

SEQ ID NO: 1899976 - DNA, 15 bp, Homo sapiens
attgattatggtgta

SEQ ID NO: 1899977 - DNA, 15 bp, Homo sapiens
ttgattatggtgtaa

SEQ ID NO: 1899978 - DNA, 15 bp, Homo sapiens
tgattatggtgtaaa

SEQ ID NO: 1899979 - DNA, 15 bp, Homo sapiens
gattatggtgtaaag

SEQ ID NO: 1899980 - DNA, 15 bp, Homo sapiens
attatggtgtaaaga

SEQ ID NO: 1899981 - DNA, 15 bp, Homo sapiens
ttatggtgtaaagaa

SEQ ID NO: 1899982 - DNA, 15 bp, Homo sapiens
tatggtgtaaagaat

SEQ ID NO: 1899983 - DNA, 15 bp, Homo sapiens
atggtgtaaagaatt

SEQ ID NO: 1899984 - DNA, 15 bp, Homo sapiens
tggtgtaaagaatta

SEQ ID NO: 1899985 - DNA, 15 bp, Homo sapiens
ggtgtaaagaattaa

SEQ ID NO: 1899986 - DNA, 15 bp, Homo sapiens
gtgtaaagaattaat

SEQ ID NO: 1899987 - DNA, 15 bp, Homo sapiens
tgtaaagaattaata

SEQ ID NO: 1899988 - DNA, 15 bp, Homo sapiens
gtaaagaattaatat

SEQ ID NO: 1899989 - DNA, 15 bp, Homo sapiens
taaagaattaatatg

SEQ ID NO: 1899990 - DNA, 15 bp, Homo sapiens
aaagaattaatatgg

SEQ ID NO: 1899991 - DNA, 15 bp, Homo sapiens
aagaattaatatggt

SEQ ID NO: 1899992 - DNA, 15 bp, Homo sapiens
agaattaatatggtg

SEQ ID NO: 1899993 - DNA, 15 bp, Homo sapiens
gaattaatatggtgg

SEQ ID NO: 1899994 - DNA, 15 bp, Homo sapiens
aattaatatggtggt

SEQ ID NO: 1899995 - DNA, 15 bp, Homo sapiens
attaatatggtggtt

SEQ ID NO: 1899996 - DNA, 15 bp, Homo sapiens
taatatggtggttat

SEQ ID NO: 1899997 - DNA, 15 bp, Homo sapiens
aatatggtggttata

SEQ ID NO: 1899998 - DNA, 15 bp, Homo sapiens
atatggtggttatat

SEQ ID NO: 1899999 - DNA, 15 bp, Homo sapiens
tatggtggttatata

SEQ ID NO: 1900000 - DNA, 15 bp, Homo sapiens
atggtggttatatac

SEQ ID NO: 1900001 - DNA, 15 bp, Homo sapiens
tggtggttatatact

SEQ ID NO: 1900002 - DNA, 15 bp, Homo sapiens
ggtggttatatactc

SEQ ID NO: 1900003 - DNA, 15 bp, Homo sapiens
gtggttatatactct

SEQ ID NO: 1900004 - DNA, 15 bp, Homo sapiens
tggttatatactctt

SEQ ID NO: 1900005 - DNA, 15 bp, Homo sapiens
ggttatatactcttt

SEQ ID NO: 1900006 - DNA, 15 bp, Homo sapiens
gttatatactctttg

SEQ ID NO: 1900007 - DNA, 15 bp, Homo sapiens
ttatatactctttgt

SEQ ID NO: 1900008 - DNA, 15 bp, Homo sapiens
tatatactctttgtt

SEQ ID NO: 1900009 - DNA, 15 bp, Homo sapiens
tatactctttgttag

SEQ ID NO: 1900010 - DNA, 15 bp, Homo sapiens
atactctttgttaga

SEQ ID NO: 1900011 - DNA, 15 bp, Homo sapiens
tactctttgttagac

SEQ ID NO: 1900012 - DNA, 15 bp, Homo sapiens
actctttgttagaca

SEQ ID NO: 1900013 - DNA, 15 bp, Homo sapiens
ctctttgttagacac

SEQ ID NO: 1900014 - DNA, 15 bp, Homo sapiens
tctttgttagacacc

SEQ ID NO: 1900015 - DNA, 15 bp, Homo sapiens
ctttgttagacacct

SEQ ID NO: 1900016 - DNA, 15 bp, Homo sapiens
tttgttagacacctt

SEQ ID NO: 1900017 - DNA, 15 bp, Homo sapiens
ttgttagacaccttg

SEQ ID NO: 1900018 - DNA, 15 bp, Homo sapiens
tgttagacaccttgg

SEQ ID NO: 1900019 - DNA, 15 bp, Homo sapiens
gttagacaccttggc

SEQ ID NO: 1900020 - DNA, 15 bp, Homo sapiens
ttagacaccttggct

SEQ ID NO: 1900021 - DNA, 15 bp, Homo sapiens
tagacaccttggctt

SEQ ID NO: 1900022 - DNA, 15 bp, Homo sapiens
agacaccttggctta

SEQ ID NO: 1900023 - DNA, 15 bp, Homo sapiens
gacaccttggcttac

SEQ ID NO: 1900024 - DNA, 15 bp, Homo sapiens
acaccttggcttaca

SEQ ID NO: 1900025 - DNA, 15 bp, Homo sapiens
caccttggcttacaa

SEQ ID NO: 1900026 - DNA, 15 bp, Homo sapiens
accttggcttacaag

SEQ ID NO: 1900027 - DNA, 15 bp, Homo sapiens
ccttggcttacaaga

SEQ ID NO: 1900028 - DNA, 15 bp, Homo sapiens
cttggcttacaagac

SEQ ID NO: 1900029 - DNA, 15 bp, Homo sapiens
ttggcttacaagacg

SEQ ID NO: 1900030 - DNA, 15 bp, Homo sapiens
tggcttacaagacgt

SEQ ID NO: 1900031 - DNA, 15 bp, Homo sapiens
ggcttacaagacgta

SEQ ID NO: 1900032 - DNA, 15 bp, Homo sapiens
gcttacaagacgtaa

SEQ ID NO: 1900033 - DNA, 15 bp, Homo sapiens
cttacaagacgtaag

SEQ ID NO: 1900034 - DNA, 15 bp, Homo sapiens
ttacaagacgtaagc

SEQ ID NO: 1900035 - DNA, 15 bp, Homo sapiens
tacaagacgtaagcg

SEQ ID NO: 1900036 - DNA, 15 bp, Homo sapiens
acaagacgtaagcgt

SEQ ID NO: 1900037 - DNA, 15 bp, Homo sapiens
caagacgtaagcgta

SEQ ID NO: 1900038 - DNA, 15 bp, Homo sapiens
agacgtaagcgtaaa

SEQ ID NO: 1900039 - DNA, 15 bp, Homo sapiens
gacgtaagcgtaaag

SEQ ID NO: 1900040 - DNA, 15 bp, Homo sapiens
acgtaagcgtaaagt

SEQ ID NO: 1900041 - DNA, 15 bp, Homo sapiens
cgtaagcgtaaagtg

SEQ ID NO: 1900042 - DNA, 15 bp, Homo sapiens
gtaagcgtaaagtgt

SEQ ID NO: 1900043 - DNA, 15 bp, Homo sapiens
taagcgtaaagtgta

SEQ ID NO: 1900044 - DNA, 15 bp, Homo sapiens
aagcgtaaagtgtag

SEQ ID NO: 1900045 - DNA, 15 bp, Homo sapiens
agcgtaaagtgtagt

SEQ ID NO: 1900046 - DNA, 15 bp, Homo sapiens
gcgtaaagtgtagtg

SEQ ID NO: 1900047 - DNA, 15 bp, Homo sapiens
cgtaaagtgtagtgc

SEQ ID NO: 1900048 - DNA, 15 bp, Homo sapiens
gtaaagtgtagtgcg

SEQ ID NO: 1900049 - DNA, 15 bp, Homo sapiens
taaagtgtagtgcgc

SEQ ID NO: 1900050 - DNA, 15 bp, Homo sapiens
aaagtgtagtgcgct

SEQ ID NO: 1900051 - DNA, 15 bp, Homo sapiens
aagtgtagtgcgctt

SEQ ID NO: 1900052 - DNA, 15 bp, Homo sapiens
agtgtagtgcgcttt

SEQ ID NO: 1900053 - DNA, 15 bp, Homo sapiens
gtgtagtgcgcttta

SEQ ID NO: 1900054 - DNA, 15 bp, Homo sapiens
tgtagtgcgctttag

SEQ ID NO: 1900055 - DNA, 15 bp, Homo sapiens
gtagtgcgctttagt

SEQ ID NO: 1900056 - DNA, 15 bp, Homo sapiens
tagtgcgctttagtc

SEQ ID NO: 1900057 - DNA, 15 bp, Homo sapiens
agtgcgctttagtca

SEQ ID NO: 1900058 - DNA, 15 bp, Homo sapiens
gtgcgctttagtcag

SEQ ID NO: 1900059 - DNA, 15 bp, Homo sapiens
tgcgctttagtcagt

SEQ ID NO: 1900060 - DNA, 15 bp, Homo sapiens
gcgctttagtcagta

SEQ ID NO: 1900061 - DNA, 15 bp, Homo sapiens
cgctttagtcagtat

SEQ ID NO: 1900062 - DNA, 15 bp, Homo sapiens
gctttagtcagtatg

SEQ ID NO: 1900063 - DNA, 15 bp, Homo sapiens
ctttagtcagtatgg

SEQ ID NO: 1900064 - DNA, 15 bp, Homo sapiens
tttagtcagtatggc

SEQ ID NO: 1900065 - DNA, 15 bp, Homo sapiens
ttagtcagtatggcc

SEQ ID NO: 1900066 - DNA, 15 bp, Homo sapiens
tagtcagtatggcca

SEQ ID NO: 1900067 - DNA, 15 bp, Homo sapiens
agtcagtatggccac

SEQ ID NO: 1900068 - DNA, 15 bp, Homo sapiens
gtcagtatggccaca

SEQ ID NO: 1900069 - DNA, 15 bp, Homo sapiens
tcagtatggccacat

SEQ ID NO: 1900070 - DNA, 15 bp, Homo sapiens
cagtatggccacatg

SEQ ID NO: 1900071 - DNA, 15 bp, Homo sapiens
agtatggccacatgg

SEQ ID NO: 1900072 - DNA, 15 bp, Homo sapiens
gtatggccacatggt

SEQ ID NO: 1900073 - DNA, 15 bp, Homo sapiens
tatggccacatggtc

SEQ ID NO: 1900074 - DNA, 15 bp, Homo sapiens
atggccacatggtcc

SEQ ID NO: 1900075 - DNA, 15 bp, Homo sapiens
tggccacatggtcct

SEQ ID NO: 1900076 - DNA, 15 bp, Homo sapiens
ggccacatggtcctt

SEQ ID NO: 1900077 - DNA, 15 bp, Homo sapiens
gccacatggtccttt

SEQ ID NO: 1900078 - DNA, 15 bp, Homo sapiens
ccacatggtcctttg

SEQ ID NO: 1900079 - DNA, 15 bp, Homo sapiens
cacatggtcctttgg

SEQ ID NO: 1900080 - DNA, 15 bp, Homo sapiens
acatggtcctttggt

SEQ ID NO: 1900081 - DNA, 15 bp, Homo sapiens
catggtcctttggtg

SEQ ID NO: 1900082 - DNA, 15 bp, Homo sapiens
atggtcctttggtgg

SEQ ID NO: 1900083 - DNA, 15 bp, Homo sapiens
tggtcctttggtggt

SEQ ID NO: 1900084 - DNA, 15 bp, Homo sapiens
ggtcctttggtggta

SEQ ID NO: 1900085 - DNA, 15 bp, Homo sapiens
gtcctttggtggtaa

SEQ ID NO: 1900086 - DNA, 15 bp, Homo sapiens
tcctttggtggtaaa

SEQ ID NO: 1900087 - DNA, 15 bp, Homo sapiens
cctttggtggtaaat

SEQ ID NO: 1900088 - DNA, 15 bp, Homo sapiens
ctttggtggtaaatt

SEQ ID NO: 1900089 - DNA, 15 bp, Homo sapiens
tttggtggtaaattg

SEQ ID NO: 1900090 - DNA, 15 bp, Homo sapiens
ttggtggtaaattgt

SEQ ID NO: 1900091 - DNA, 15 bp, Homo sapiens
tggtggtaaattgtt

SEQ ID NO: 1900092 - DNA, 15 bp, Homo sapiens
ggtggtaaattgttt

SEQ ID NO: 1900093 - DNA, 15 bp, Homo sapiens
gtggtaaattgtttg

SEQ ID NO: 1900094 - DNA, 15 bp, Homo sapiens
tggtaaattgtttga

SEQ ID NO: 1900095 - DNA, 15 bp, Homo sapiens
ggtaaattgtttgag

SEQ ID NO: 1900096 - DNA, 15 bp, Homo sapiens
gtaaattgtttgaga

SEQ ID NO: 1900097 - DNA, 15 bp, Homo sapiens
taaattgtttgagat

SEQ ID NO: 1900098 - DNA, 15 bp, Homo sapiens
aaattgtttgagatg

SEQ ID NO: 1900099 - DNA, 15 bp, Homo sapiens
aattgtttgagatgc

SEQ ID NO: 1900100 - DNA, 15 bp, Homo sapiens
attgtttgagatgcc

SEQ ID NO: 1900101 - DNA, 15 bp, Homo sapiens
ttgtttgagatgcct

SEQ ID NO: 1900102 - DNA, 15 bp, Homo sapiens
tgtttgagatgcctc

SEQ ID NO: 1900103 - DNA, 15 bp, Homo sapiens
gtttgagatgcctcc

SEQ ID NO: 1900104 - DNA, 15 bp, Homo sapiens
tttgagatgcctcca

SEQ ID NO: 1900105 - DNA, 15 bp, Homo sapiens
ttgagatgcctccag

SEQ ID NO: 1900106 - DNA, 15 bp, Homo sapiens
tgagatgcctccagt

SEQ ID NO: 1900107 - DNA, 15 bp, Homo sapiens
gagatgcctccagtt

SEQ ID NO: 1900108 - DNA, 15 bp, Homo sapiens
agatgcctccagttt

SEQ ID NO: 1900109 - DNA, 15 bp, Homo sapiens
gatgcctccagtttt

SEQ ID NO: 1900110 - DNA, 15 bp, Homo sapiens
atgcctccagttttt

SEQ ID NO: 1900111 - DNA, 15 bp, Homo sapiens
tgcctccagttttta

SEQ ID NO: 1900112 - DNA, 15 bp, Homo sapiens
gcctccagtttttaa

SEQ ID NO: 1900113 - DNA, 15 bp, Homo sapiens
cctccagtttttaaa

SEQ ID NO: 1900114 - DNA, 15 bp, Homo sapiens
ctccagtttttaaaa

SEQ ID NO: 1900115 - DNA, 15 bp, Homo sapiens
tccagtttttaaaag

SEQ ID NO: 1900116 - DNA, 15 bp, Homo sapiens
ccagtttttaaaagg

SEQ ID NO: 1900117 - DNA, 15 bp, Homo sapiens
cagtttttaaaagga

SEQ ID NO: 1900118 - DNA, 15 bp, Homo sapiens
agtttttaaaaggag

SEQ ID NO: 1900119 - DNA, 15 bp, Homo sapiens
gtttttaaaaggagt

SEQ ID NO: 1900120 - DNA, 15 bp, Homo sapiens
tttttaaaaggagta

SEQ ID NO: 1900121 - DNA, 15 bp, Homo sapiens
ttttaaaaggagtag

SEQ ID NO: 1900122 - DNA, 15 bp, Homo sapiens
tttaaaaggagtagc

SEQ ID NO: 1900123 - DNA, 15 bp, Homo sapiens
ttaaaaggagtagca

SEQ ID NO: 1900124 - DNA, 15 bp, Homo sapiens
taaaaggagtagcat

SEQ ID NO: 1900125 - DNA, 15 bp, Homo sapiens
aaaaggagtagcata

SEQ ID NO: 1900126 - DNA, 15 bp, Homo sapiens
aaaggagtagcatat

SEQ ID NO: 1900127 - DNA, 15 bp, Homo sapiens
aaggagtagcatatc

SEQ ID NO: 1900128 - DNA, 15 bp, Homo sapiens
aggagtagcatatcg

SEQ ID NO: 1900129 - DNA, 15 bp, Homo sapiens
ggagtagcatatcgg

SEQ ID NO: 1900130 - DNA, 15 bp, Homo sapiens
gagtagcatatcggg

SEQ ID NO: 1900131 - DNA, 15 bp, Homo sapiens
agtagcatatcgggc

SEQ ID NO: 1900132 - DNA, 15 bp, Homo sapiens
gtagcatatcgggcc

SEQ ID NO: 1900133 - DNA, 15 bp, Homo sapiens
tagcatatcgggcca

SEQ ID NO: 1900134 - DNA, 15 bp, Homo sapiens
agcatatcgggccag

SEQ ID NO: 1900135 - DNA, 15 bp, Homo sapiens
gcatatcgggccagg

SEQ ID NO: 1900136 - DNA, 15 bp, Homo sapiens
catatcgggccagga

SEQ ID NO: 1900137 - DNA, 15 bp, Homo sapiens
atatcgggccaggag

SEQ ID NO: 1900138 - DNA, 15 bp, Homo sapiens
tatcgggccaggagc

SEQ ID NO: 1900139 - DNA, 15 bp, Homo sapiens
atcgggccaggagca

SEQ ID NO: 1900140 - DNA, 15 bp, Homo sapiens
tcgggccaggagcag

SEQ ID NO: 1900141 - DNA, 15 bp, Homo sapiens
cgggccaggagcagt

SEQ ID NO: 1900142 - DNA, 15 bp, Homo sapiens
gggccaggagcagtg

SEQ ID NO: 1900143 - DNA, 15 bp, Homo sapiens
ggccaggagcagtgg

SEQ ID NO: 1900144 - DNA, 15 bp, Homo sapiens
ttggaaggccgaggc

SEQ ID NO: 1900145 - DNA, 15 bp, Homo sapiens
tggaaggccgaggca

SEQ ID NO: 1900146 - DNA, 15 bp, Homo sapiens
ggaaggccgaggcaa

SEQ ID NO: 1900147 - DNA, 15 bp, Homo sapiens
gaaggccgaggcaag

SEQ ID NO: 1900148 - DNA, 15 bp, Homo sapiens
aaggccgaggcaaga

SEQ ID NO: 1900149 - DNA, 15 bp, Homo sapiens
aggccgaggcaagag

SEQ ID NO: 1900150 - DNA, 15 bp, Homo sapiens
ggccgaggcaagagg

SEQ ID NO: 1900151 - DNA, 15 bp, Homo sapiens
gccgaggcaagagga

SEQ ID NO: 1900152 - DNA, 15 bp, Homo sapiens
ccgaggcaagaggat

SEQ ID NO: 1900153 - DNA, 15 bp, Homo sapiens
cgaggcaagaggatt

SEQ ID NO: 1900154 - DNA, 15 bp, Homo sapiens
aacatagtgagacca

SEQ ID NO: 1900155 - DNA, 15 bp, Homo sapiens
acatagtgagaccac

SEQ ID NO: 1900156 - DNA, 15 bp, Homo sapiens
catagtgagaccact

SEQ ID NO: 1900157 - DNA, 15 bp, Homo sapiens
atagtgagaccactt

SEQ ID NO: 1900158 - DNA, 15 bp, Homo sapiens
tagtgagaccacttt

SEQ ID NO: 1900159 - DNA, 15 bp, Homo sapiens
agtgagaccactttg

SEQ ID NO: 1900160 - DNA, 15 bp, Homo sapiens
gtgagaccactttgt

SEQ ID NO: 1900161 - DNA, 15 bp, Homo sapiens
tgagaccactttgtt

SEQ ID NO: 1900162 - DNA, 15 bp, Homo sapiens
gagaccactttgttt

SEQ ID NO: 1900163 - DNA, 15 bp, Homo sapiens
agaccactttgtttc

SEQ ID NO: 1900164 - DNA, 15 bp, Homo sapiens
gaccactttgtttct

SEQ ID NO: 1900165 - DNA, 15 bp, Homo sapiens
accactttgtttctt

SEQ ID NO: 1900166 - DNA, 15 bp, Homo sapiens
ccactttgtttcttt

SEQ ID NO: 1900167 - DNA, 15 bp, Homo sapiens
cactttgtttcttta

SEQ ID NO: 1900168 - DNA, 15 bp, Homo sapiens
ctttgtttctttaaa

SEQ ID NO: 1900169 - DNA, 15 bp, Homo sapiens
tttgtttctttaaaa

SEQ ID NO: 1900170 - DNA, 15 bp, Homo sapiens
ttgtttctttaaaaa

SEQ ID NO: 1900171 - DNA, 15 bp, Homo sapiens
tgtttctttaaaaaa

SEQ ID NO: 1900172 - DNA, 15 bp, Homo sapiens
gtttctttaaaaaaa

SEQ ID NO: 1900173 - DNA, 15 bp, Homo sapiens
tttctttaaaaaaaa

SEQ ID NO: 1900174 - DNA, 15 bp, Homo sapiens
ttctttaaaaaaaaa

SEQ ID NO: 1900175 - DNA, 15 bp, Homo sapiens
aaaaaaaaaaaggca

SEQ ID NO: 1900176 - DNA, 15 bp, Homo sapiens
aaaaaaaaaggcaaa

SEQ ID NO: 1900177 - DNA, 15 bp, Homo sapiens
aaaaaaaaggcaaaa

SEQ ID NO: 1900178 - DNA, 15 bp, Homo sapiens
aaaaaaaggcaaaaa

SEQ ID NO: 1900179 - DNA, 15 bp, Homo sapiens
aaaaaaggcaaaaac

SEQ ID NO: 1900180 - DNA, 15 bp, Homo sapiens
aaaaaggcaaaaaca

SEQ ID NO: 1900181 - DNA, 15 bp, Homo sapiens
aaaaggcaaaaacag

SEQ ID NO: 1900182 - DNA, 15 bp, Homo sapiens
aaaggcaaaaacagg

SEQ ID NO: 1900183 - DNA, 15 bp, Homo sapiens
aaggcaaaaacaggc

SEQ ID NO: 1900184 - DNA, 15 bp, Homo sapiens
aggcaaaaacaggct

SEQ ID NO: 1900185 - DNA, 15 bp, Homo sapiens
ggcaaaaacaggctg

SEQ ID NO: 1900186 - DNA, 15 bp, Homo sapiens
gcaaaaacaggctgg

SEQ ID NO: 1900187 - DNA, 15 bp, Homo sapiens
caaaaacaggctggg

SEQ ID NO: 1900188 - DNA, 15 bp, Homo sapiens
aaaaacaggctgggc

SEQ ID NO: 1900189 - DNA, 15 bp, Homo sapiens
aaaacaggctgggca

SEQ ID NO: 1900190 - DNA, 15 bp, Homo sapiens
aaacaggctgggcat

SEQ ID NO: 1900191 - DNA, 15 bp, Homo sapiens
aacaggctgggcatg

SEQ ID NO: 1900192 - DNA, 15 bp, Homo sapiens
acaggctgggcatgg

SEQ ID NO: 1900193 - DNA, 15 bp, Homo sapiens
caggctgggcatggt

SEQ ID NO: 1900194 - DNA, 15 bp, Homo sapiens
aggctgggcatggtg

SEQ ID NO: 1900195 - DNA, 15 bp, Homo sapiens
tgggcatggtggctg

SEQ ID NO: 1900196 - DNA, 15 bp, Homo sapiens
gggcatggtggctga

SEQ ID NO: 1900197 - DNA, 15 bp, Homo sapiens
ggcatggtggctgat

SEQ ID NO: 1900198 - DNA, 15 bp, Homo sapiens
gcatggtggctgatg

SEQ ID NO: 1900199 - DNA, 15 bp, Homo sapiens
catggtggctgatgc

SEQ ID NO: 1900200 - DNA, 15 bp, Homo sapiens
atggtggctgatgcc

SEQ ID NO: 1900201 - DNA, 15 bp, Homo sapiens
tggtggctgatgcct

SEQ ID NO: 1900202 - DNA, 15 bp, Homo sapiens
cctgtaatcccagcg

SEQ ID NO: 1900203 - DNA, 15 bp, Homo sapiens
ctgtaatcccagcgc

SEQ ID NO: 1900204 - DNA, 15 bp, Homo sapiens
tgtaatcccagcgct

SEQ ID NO: 1900205 - DNA, 15 bp, Homo sapiens
gtaatcccagcgctt

SEQ ID NO: 1900206 - DNA, 15 bp, Homo sapiens
taatcccagcgcttt

SEQ ID NO: 1900207 - DNA, 15 bp, Homo sapiens
aatcccagcgctttg

SEQ ID NO: 1900208 - DNA, 15 bp, Homo sapiens
atcccagcgctttgt

SEQ ID NO: 1900209 - DNA, 15 bp, Homo sapiens
tcccagcgctttgtg

SEQ ID NO: 1900210 - DNA, 15 bp, Homo sapiens
cccagcgctttgtga

SEQ ID NO: 1900211 - DNA, 15 bp, Homo sapiens
ccagcgctttgtgag

SEQ ID NO: 1900212 - DNA, 15 bp, Homo sapiens
cagcgctttgtgagg

SEQ ID NO: 1900213 - DNA, 15 bp, Homo sapiens
agcgctttgtgaggc

SEQ ID NO: 1900214 - DNA, 15 bp, Homo sapiens
gcgctttgtgaggca

SEQ ID NO: 1900215 - DNA, 15 bp, Homo sapiens
cgctttgtgaggcag

SEQ ID NO: 1900216 - DNA, 15 bp, Homo sapiens
gctttgtgaggcaga

SEQ ID NO: 1900217 - DNA, 15 bp, Homo sapiens
ctttgtgaggcagag

SEQ ID NO: 1900218 - DNA, 15 bp, Homo sapiens
tttgtgaggcagagg

SEQ ID NO: 1900219 - DNA, 15 bp, Homo sapiens
ttgtgaggcagaggt

SEQ ID NO: 1900220 - DNA, 15 bp, Homo sapiens
tgtgaggcagaggtg

SEQ ID NO: 1900221 - DNA, 15 bp, Homo sapiens
gtgaggcagaggtga

SEQ ID NO: 1900222 - DNA, 15 bp, Homo sapiens
tgaggcagaggtgag

SEQ ID NO: 1900223 - DNA, 15 bp, Homo sapiens
gaggcagaggtgagc

SEQ ID NO: 1900224 - DNA, 15 bp, Homo sapiens
aggcagaggtgagcg

SEQ ID NO: 1900225 - DNA, 15 bp, Homo sapiens
ggcagaggtgagcgg

SEQ ID NO: 1900226 - DNA, 15 bp, Homo sapiens
gcagaggtgagcgga

SEQ ID NO: 1900227 - DNA, 15 bp, Homo sapiens
cagaggtgagcggat

SEQ ID NO: 1900228 - DNA, 15 bp, Homo sapiens
agaggtgagcggatc

SEQ ID NO: 1900229 - DNA, 15 bp, Homo sapiens
gaggtgagcggatca

SEQ ID NO: 1900230 - DNA, 15 bp, Homo sapiens
aggtgagcggatcac

SEQ ID NO: 1900231 - DNA, 15 bp, Homo sapiens
ggtgagcggatcact

SEQ ID NO: 1900232 - DNA, 15 bp, Homo sapiens
gtgagcggatcactt

SEQ ID NO: 1900233 - DNA, 15 bp, Homo sapiens
tgagcggatcacttg

SEQ ID NO: 1900234 - DNA, 15 bp, Homo sapiens
gagcggatcacttga

SEQ ID NO: 1900235 - DNA, 15 bp, Homo sapiens
aatttggtctgtttt

SEQ ID NO: 1900236 - DNA, 15 bp, Homo sapiens
atttggtctgttttg

SEQ ID NO: 1900237 - DNA, 15 bp, Homo sapiens
tttggtctgttttgt

SEQ ID NO: 1900238 - DNA, 15 bp, Homo sapiens
ttggtctgttttgtg

SEQ ID NO: 1900239 - DNA, 15 bp, Homo sapiens
tggtctgttttgtgg

SEQ ID NO: 1900240 - DNA, 15 bp, Homo sapiens
ggtctgttttgtggg

SEQ ID NO: 1900241 - DNA, 15 bp, Homo sapiens
gtctgttttgtgggt

SEQ ID NO: 1900242 - DNA, 15 bp, Homo sapiens
tctgttttgtgggtt

SEQ ID NO: 1900243 - DNA, 15 bp, Homo sapiens
ctgttttgtgggttt

SEQ ID NO: 1900244 - DNA, 15 bp, Homo sapiens
tgttttgtgggtttt

SEQ ID NO: 1900245 - DNA, 15 bp, Homo sapiens
gttttgtgggttttc

SEQ ID NO: 1900246 - DNA, 15 bp, Homo sapiens
ttttgtgggttttct

SEQ ID NO: 1900247 - DNA, 15 bp, Homo sapiens
tttgtgggttttctt

SEQ ID NO: 1900248 - DNA, 15 bp, Homo sapiens
ttgtgggttttcttg

SEQ ID NO: 1900249 - DNA, 15 bp, Homo sapiens
tgtgggttttcttgt

SEQ ID NO: 1900250 - DNA, 15 bp, Homo sapiens
gtgggttttcttgtt

SEQ ID NO: 1900251 - DNA, 15 bp, Homo sapiens
tgggttttcttgttt

SEQ ID NO: 1900252 - DNA, 15 bp, Homo sapiens
gggttttcttgtttt

SEQ ID NO: 1900253 - DNA, 15 bp, Homo sapiens
ggttttcttgtttta

SEQ ID NO: 1900254 - DNA, 15 bp, Homo sapiens
gttttcttgttttag

SEQ ID NO: 1900255 - DNA, 15 bp, Homo sapiens
ttttcttgttttagt

SEQ ID NO: 1900256 - DNA, 15 bp, Homo sapiens
tttcttgttttagtt

SEQ ID NO: 1900257 - DNA, 15 bp, Homo sapiens
ttcttgttttagttt

SEQ ID NO: 1900258 - DNA, 15 bp, Homo sapiens
tcttgttttagtttt

SEQ ID NO: 1900259 - DNA, 15 bp, Homo sapiens
cttgttttagtttta

SEQ ID NO: 1900260 - DNA, 15 bp, Homo sapiens
ttgttttagttttag

SEQ ID NO: 1900261 - DNA, 15 bp, Homo sapiens
tgttttagttttagt

SEQ ID NO: 1900262 - DNA, 15 bp, Homo sapiens
gttttagttttagtt

SEQ ID NO: 1900263 - DNA, 15 bp, Homo sapiens
ttttagttttagttt

SEQ ID NO: 1900264 - DNA, 15 bp, Homo sapiens
tttagttttagtttt

SEQ ID NO: 1900265 - DNA, 15 bp, Homo sapiens
ttagttttagttttt

SEQ ID NO: 1900266 - DNA, 15 bp, Homo sapiens
tagttttagtttttg

SEQ ID NO: 1900267 - DNA, 15 bp, Homo sapiens
agttttagtttttgt

SEQ ID NO: 1900268 - DNA, 15 bp, Homo sapiens
gttttagtttttgta

SEQ ID NO: 1900269 - DNA, 15 bp, Homo sapiens
ttttagtttttgtag

SEQ ID NO: 1900270 - DNA, 15 bp, Homo sapiens
tttagtttttgtaga

SEQ ID NO: 1900271 - DNA, 15 bp, Homo sapiens
ttagtttttgtagag

SEQ ID NO: 1900272 - DNA, 15 bp, Homo sapiens
tagtttttgtagagc

SEQ ID NO: 1900273 - DNA, 15 bp, Homo sapiens
agtttttgtagagct

SEQ ID NO: 1900274 - DNA, 15 bp, Homo sapiens
gtttttgtagagctc

SEQ ID NO: 1900275 - DNA, 15 bp, Homo sapiens
tttttgtagagctca

SEQ ID NO: 1900276 - DNA, 15 bp, Homo sapiens
ttttgtagagctcag

SEQ ID NO: 1900277 - DNA, 15 bp, Homo sapiens
tttgtagagctcaga

SEQ ID NO: 1900278 - DNA, 15 bp, Homo sapiens
ttgtagagctcagac

SEQ ID NO: 1900279 - DNA, 15 bp, Homo sapiens
tgtagagctcagacc

SEQ ID NO: 1900280 - DNA, 15 bp, Homo sapiens
gtagagctcagacct

SEQ ID NO: 1900281 - DNA, 15 bp, Homo sapiens
tagagctcagacctg

SEQ ID NO: 1900282 - DNA, 15 bp, Homo sapiens
agagctcagacctgt

SEQ ID NO: 1900283 - DNA, 15 bp, Homo sapiens
gagctcagacctgtt

SEQ ID NO: 1900284 - DNA, 15 bp, Homo sapiens
agctcagacctgttc

SEQ ID NO: 1900285 - DNA, 15 bp, Homo sapiens
gctcagacctgttct

SEQ ID NO: 1900286 - DNA, 15 bp, Homo sapiens
ctcagacctgttctt

SEQ ID NO: 1900287 - DNA, 15 bp, Homo sapiens
tcagacctgttctta

SEQ ID NO: 1900288 - DNA, 15 bp, Homo sapiens
cagacctgttcttag

SEQ ID NO: 1900289 - DNA, 15 bp, Homo sapiens
agacctgttcttagg

SEQ ID NO: 1900290 - DNA, 15 bp, Homo sapiens
gacctgttcttaggc

SEQ ID NO: 1900291 - DNA, 15 bp, Homo sapiens
acctgttcttaggca

SEQ ID NO: 1900292 - DNA, 15 bp, Homo sapiens
cctgttcttaggcag

SEQ ID NO: 1900293 - DNA, 15 bp, Homo sapiens
ctgttcttaggcagc

SEQ ID NO: 1900294 - DNA, 15 bp, Homo sapiens
tgttcttaggcagct

SEQ ID NO: 1900295 - DNA, 15 bp, Homo sapiens
gttcttaggcagctt

SEQ ID NO: 1900296 - DNA, 15 bp, Homo sapiens
ttcttaggcagcttt

SEQ ID NO: 1900297 - DNA, 15 bp, Homo sapiens
tcttaggcagcttta

SEQ ID NO: 1900298 - DNA, 15 bp, Homo sapiens
cttaggcagctttaa

SEQ ID NO: 1900299 - DNA, 15 bp, Homo sapiens
ttaggcagctttaac

SEQ ID NO: 1900300 - DNA, 15 bp, Homo sapiens
taggcagctttaaca

SEQ ID NO: 1900301 - DNA, 15 bp, Homo sapiens
aggcagctttaacaa

SEQ ID NO: 1900302 - DNA, 15 bp, Homo sapiens
ggcagctttaacaat

SEQ ID NO: 1900303 - DNA, 15 bp, Homo sapiens
gcagctttaacaatc

SEQ ID NO: 1900304 - DNA, 15 bp, Homo sapiens
cagctttaacaatca

SEQ ID NO: 1900305 - DNA, 15 bp, Homo sapiens
agctttaacaatcaa

SEQ ID NO: 1900306 - DNA, 15 bp, Homo sapiens
gctttaacaatcaac

SEQ ID NO: 1900307 - DNA, 15 bp, Homo sapiens
ctttaacaatcaact

SEQ ID NO: 1900308 - DNA, 15 bp, Homo sapiens
tttaacaatcaactg

SEQ ID NO: 1900309 - DNA, 15 bp, Homo sapiens
ttaacaatcaactgt

SEQ ID NO: 1900310 - DNA, 15 bp, Homo sapiens
taacaatcaactgtg

SEQ ID NO: 1900311 - DNA, 15 bp, Homo sapiens
aacaatcaactgtgc

SEQ ID NO: 1900312 - DNA, 15 bp, Homo sapiens
acaatcaactgtgca

SEQ ID NO: 1900313 - DNA, 15 bp, Homo sapiens
caatcaactgtgcac

SEQ ID NO: 1900314 - DNA, 15 bp, Homo sapiens
aatcaactgtgcact

SEQ ID NO: 1900315 - DNA, 15 bp, Homo sapiens
atcaactgtgcactc

SEQ ID NO: 1900316 - DNA, 15 bp, Homo sapiens
tcaactgtgcactca

SEQ ID NO: 1900317 - DNA, 15 bp, Homo sapiens
caactgtgcactcag

SEQ ID NO: 1900318 - DNA, 15 bp, Homo sapiens
aactgtgcactcagt

SEQ ID NO: 1900319 - DNA, 15 bp, Homo sapiens
actgtgcactcagta

SEQ ID NO: 1900320 - DNA, 15 bp, Homo sapiens
ctgtgcactcagtaa

SEQ ID NO: 1900321 - DNA, 15 bp, Homo sapiens
tgtgcactcagtaat

SEQ ID NO: 1900322 - DNA, 15 bp, Homo sapiens
gtgcactcagtaatt

SEQ ID NO: 1900323 - DNA, 15 bp, Homo sapiens
tgcactcagtaattg

SEQ ID NO: 1900324 - DNA, 15 bp, Homo sapiens
gcactcagtaattga

SEQ ID NO: 1900325 - DNA, 15 bp, Homo sapiens
cactcagtaattgac

SEQ ID NO: 1900326 - DNA, 15 bp, Homo sapiens
actcagtaattgaca

SEQ ID NO: 1900327 - DNA, 15 bp, Homo sapiens
ctcagtaattgacaa

SEQ ID NO: 1900328 - DNA, 15 bp, Homo sapiens
tcagtaattgacaaa

SEQ ID NO: 1900329 - DNA, 15 bp, Homo sapiens
cagtaattgacaaat

SEQ ID NO: 1900330 - DNA, 15 bp, Homo sapiens
agtaattgacaaatc

SEQ ID NO: 1900331 - DNA, 15 bp, Homo sapiens
gtaattgacaaatca

SEQ ID NO: 1900332 - DNA, 15 bp, Homo sapiens
taattgacaaatcat

SEQ ID NO: 1900333 - DNA, 15 bp, Homo sapiens
aattgacaaatcatg

SEQ ID NO: 1900334 - DNA, 15 bp, Homo sapiens
attgacaaatcatgt

SEQ ID NO: 1900335 - DNA, 15 bp, Homo sapiens
ttgacaaatcatgtt

SEQ ID NO: 1900336 - DNA, 15 bp, Homo sapiens
tgacaaatcatgttt

SEQ ID NO: 1900337 - DNA, 15 bp, Homo sapiens
gacaaatcatgtttg

SEQ ID NO: 1900338 - DNA, 15 bp, Homo sapiens
acaaatcatgtttgt

SEQ ID NO: 1900339 - DNA, 15 bp, Homo sapiens
caaatcatgtttgtt

SEQ ID NO: 1900340 - DNA, 15 bp, Homo sapiens
aaatcatgtttgtta

SEQ ID NO: 1900341 - DNA, 15 bp, Homo sapiens
aatcatgtttgttac

SEQ ID NO: 1900342 - DNA, 15 bp, Homo sapiens
atcatgtttgttact

SEQ ID NO: 1900343 - DNA, 15 bp, Homo sapiens
tcatgtttgttactt

SEQ ID NO: 1900344 - DNA, 15 bp, Homo sapiens
catgtttgttacttt

SEQ ID NO: 1900345 - DNA, 15 bp, Homo sapiens
atgtttgttactttt

SEQ ID NO: 1900346 - DNA, 15 bp, Homo sapiens
tgtttgttactttta

SEQ ID NO: 1900347 - DNA, 15 bp, Homo sapiens
gtttgttacttttaa

SEQ ID NO: 1900348 - DNA, 15 bp, Homo sapiens
tttgttacttttaat

SEQ ID NO: 1900349 - DNA, 15 bp, Homo sapiens
ttgttacttttaatt

SEQ ID NO: 1900350 - DNA, 15 bp, Homo sapiens
tgttacttttaattt

SEQ ID NO: 1900351 - DNA, 15 bp, Homo sapiens
gttacttttaattta

SEQ ID NO: 1900352 - DNA, 15 bp, Homo sapiens
ttacttttaatttag

SEQ ID NO: 1900353 - DNA, 15 bp, Homo sapiens
tacttttaatttaga

SEQ ID NO: 1900354 - DNA, 15 bp, Homo sapiens
acttttaatttagag

SEQ ID NO: 1900355 - DNA, 15 bp, Homo sapiens
cttttaatttagagg

SEQ ID NO: 1900356 - DNA, 15 bp, Homo sapiens
ttttaatttagaggg

SEQ ID NO: 1900357 - DNA, 15 bp, Homo sapiens
tttaatttagaggga

SEQ ID NO: 1900358 - DNA, 15 bp, Homo sapiens
ttaatttagagggaa

SEQ ID NO: 1900359 - DNA, 15 bp, Homo sapiens
taatttagagggaat

SEQ ID NO: 1900360 - DNA, 15 bp, Homo sapiens
aatttagagggaatt

SEQ ID NO: 1900361 - DNA, 15 bp, Homo sapiens
atttagagggaatta

SEQ ID NO: 1900362 - DNA, 15 bp, Homo sapiens
tttagagggaattag

SEQ ID NO: 1900363 - DNA, 15 bp, Homo sapiens
ttagagggaattagg

SEQ ID NO: 1900364 - DNA, 15 bp, Homo sapiens
tagagggaattaggt

SEQ ID NO: 1900365 - DNA, 15 bp, Homo sapiens
agagggaattaggtt

SEQ ID NO: 1900366 - DNA, 15 bp, Homo sapiens
gagggaattaggttt

SEQ ID NO: 1900367 - DNA, 15 bp, Homo sapiens
agggaattaggtttg

SEQ ID NO: 1900368 - DNA, 15 bp, Homo sapiens
gggaattaggtttgt

SEQ ID NO: 1900369 - DNA, 15 bp, Homo sapiens
ggaattaggtttgtt

SEQ ID NO: 1900370 - DNA, 15 bp, Homo sapiens
gaattaggtttgtta

SEQ ID NO: 1900371 - DNA, 15 bp, Homo sapiens
aattaggtttgttaa

SEQ ID NO: 1900372 - DNA, 15 bp, Homo sapiens
attaggtttgttaag

SEQ ID NO: 1900373 - DNA, 15 bp, Homo sapiens
ttaggtttgttaagc

SEQ ID NO: 1900374 - DNA, 15 bp, Homo sapiens
taggtttgttaagct

SEQ ID NO: 1900375 - DNA, 15 bp, Homo sapiens
aggtttgttaagctc

SEQ ID NO: 1900376 - DNA, 15 bp, Homo sapiens
ggtttgttaagctct

SEQ ID NO: 1900377 - DNA, 15 bp, Homo sapiens
gtttgttaagctctt

SEQ ID NO: 1900378 - DNA, 15 bp, Homo sapiens
tttgttaagctcttg

SEQ ID NO: 1900379 - DNA, 15 bp, Homo sapiens
ttgttaagctcttgc

SEQ ID NO: 1900380 - DNA, 15 bp, Homo sapiens
tgttaagctcttgct

SEQ ID NO: 1900381 - DNA, 15 bp, Homo sapiens
gttaagctcttgctc

SEQ ID NO: 1900382 - DNA, 15 bp, Homo sapiens
ttaagctcttgctcc

SEQ ID NO: 1900383 - DNA, 15 bp, Homo sapiens
taagctcttgctcct

SEQ ID NO: 1900384 - DNA, 15 bp, Homo sapiens
aagctcttgctcctt

SEQ ID NO: 1900385 - DNA, 15 bp, Homo sapiens
agctcttgctccttc

SEQ ID NO: 1900386 - DNA, 15 bp, Homo sapiens
gctcttgctccttct

SEQ ID NO: 1900387 - DNA, 15 bp, Homo sapiens
ctcttgctccttctt

SEQ ID NO: 1900388 - DNA, 15 bp, Homo sapiens
tcttgctccttcttt

SEQ ID NO: 1900389 - DNA, 15 bp, Homo sapiens
cttgctccttcttta

SEQ ID NO: 1900390 - DNA, 15 bp, Homo sapiens
ttgctccttctttag

SEQ ID NO: 1900391 - DNA, 15 bp, Homo sapiens
tgctccttctttaga

SEQ ID NO: 1900392 - DNA, 15 bp, Homo sapiens
gctccttctttagag

SEQ ID NO: 1900393 - DNA, 15 bp, Homo sapiens
ctccttctttagaga

SEQ ID NO: 1900394 - DNA, 15 bp, Homo sapiens
tccttctttagagat

SEQ ID NO: 1900395 - DNA, 15 bp, Homo sapiens
ccttctttagagatg

SEQ ID NO: 1900396 - DNA, 15 bp, Homo sapiens
cttctttagagatgg

SEQ ID NO: 1900397 - DNA, 15 bp, Homo sapiens
ttctttagagatggg

SEQ ID NO: 1900398 - DNA, 15 bp, Homo sapiens
tctttagagatgggg

SEQ ID NO: 1900399 - DNA, 15 bp, Homo sapiens
ctttagagatggggt

SEQ ID NO: 1900400 - DNA, 15 bp, Homo sapiens
tagagatggggtcta

SEQ ID NO: 1900401 - DNA, 15 bp, Homo sapiens
agagatggggtctag

SEQ ID NO: 1900402 - DNA, 15 bp, Homo sapiens
gagatggggtctagc

SEQ ID NO: 1900403 - DNA, 15 bp, Homo sapiens
agatggggtctagct

SEQ ID NO: 1900404 - DNA, 15 bp, Homo sapiens
gatggggtctagctc

SEQ ID NO: 1900405 - DNA, 15 bp, Homo sapiens
atggggtctagctct

SEQ ID NO: 1900406 - DNA, 15 bp, Homo sapiens
tggggtctagctctg

SEQ ID NO: 1900407 - DNA, 15 bp, Homo sapiens
ggggtctagctctgt

SEQ ID NO: 1900408 - DNA, 15 bp, Homo sapiens
gggtctagctctgtc

SEQ ID NO: 1900409 - DNA, 15 bp, Homo sapiens
ggtctagctctgtca

SEQ ID NO: 1900410 - DNA, 15 bp, Homo sapiens
gtctagctctgtcac

SEQ ID NO: 1900411 - DNA, 15 bp, Homo sapiens
tctagctctgtcacc

SEQ ID NO: 1900412 - DNA, 15 bp, Homo sapiens
ctagctctgtcaccc

SEQ ID NO: 1900413 - DNA, 15 bp, Homo sapiens
tagctctgtcaccca

SEQ ID NO: 1900414 - DNA, 15 bp, Homo sapiens
cacccaggctggagc

SEQ ID NO: 1900415 - DNA, 15 bp, Homo sapiens
acccaggctggagcg

SEQ ID NO: 1900416 - DNA, 15 bp, Homo sapiens
caggctggagcgcag

SEQ ID NO: 1900417 - DNA, 15 bp, Homo sapiens
aggctggagcgcagt

SEQ ID NO: 1900418 - DNA, 15 bp, Homo sapiens
ggctggagcgcagtg

SEQ ID NO: 1900419 - DNA, 15 bp, Homo sapiens
gctggagcgcagtgg

SEQ ID NO: 1900420 - DNA, 15 bp, Homo sapiens
ctggagcgcagtggt

SEQ ID NO: 1900421 - DNA, 15 bp, Homo sapiens
tggagcgcagtggta

SEQ ID NO: 1900422 - DNA, 15 bp, Homo sapiens
ggagcgcagtggtat

SEQ ID NO: 1900423 - DNA, 15 bp, Homo sapiens
gagcgcagtggtatg

SEQ ID NO: 1900424 - DNA, 15 bp, Homo sapiens
agcgcagtggtatga

SEQ ID NO: 1900425 - DNA, 15 bp, Homo sapiens
gcgcagtggtatgat

SEQ ID NO: 1900426 - DNA, 15 bp, Homo sapiens
cgcagtggtatgatc

SEQ ID NO: 1900427 - DNA, 15 bp, Homo sapiens
gcagtggtatgatca

SEQ ID NO: 1900428 - DNA, 15 bp, Homo sapiens
cagtggtatgatcac

SEQ ID NO: 1900429 - DNA, 15 bp, Homo sapiens
agtggtatgatcaca

SEQ ID NO: 1900430 - DNA, 15 bp, Homo sapiens
gtggtatgatcacag

SEQ ID NO: 1900431 - DNA, 15 bp, Homo sapiens
tggtatgatcacagc

SEQ ID NO: 1900432 - DNA, 15 bp, Homo sapiens
ggtatgatcacagct

SEQ ID NO: 1900433 - DNA, 15 bp, Homo sapiens
gtatgatcacagctc

SEQ ID NO: 1900434 - DNA, 15 bp, Homo sapiens
tatgatcacagctca

SEQ ID NO: 1900435 - DNA, 15 bp, Homo sapiens
acagctcactgcagt

SEQ ID NO: 1900436 - DNA, 15 bp, Homo sapiens
cagctcactgcagtc

SEQ ID NO: 1900437 - DNA, 15 bp, Homo sapiens
agctcactgcagtct

SEQ ID NO: 1900438 - DNA, 15 bp, Homo sapiens
cactgcagtctcaat

SEQ ID NO: 1900439 - DNA, 15 bp, Homo sapiens
actgcagtctcaatc

SEQ ID NO: 1900440 - DNA, 15 bp, Homo sapiens
ctgcagtctcaatct

SEQ ID NO: 1900441 - DNA, 15 bp, Homo sapiens
tgcagtctcaatctg

SEQ ID NO: 1900442 - DNA, 15 bp, Homo sapiens
gcagtctcaatctgc

SEQ ID NO: 1900443 - DNA, 15 bp, Homo sapiens
cagtctcaatctgct

SEQ ID NO: 1900444 - DNA, 15 bp, Homo sapiens
agtctcaatctgctc

SEQ ID NO: 1900445 - DNA, 15 bp, Homo sapiens
gtctcaatctgctca

SEQ ID NO: 1900446 - DNA, 15 bp, Homo sapiens
tctcaatctgctcaa

SEQ ID NO: 1900447 - DNA, 15 bp, Homo sapiens
ctcaatctgctcaag

SEQ ID NO: 1900448 - DNA, 15 bp, Homo sapiens
tcaatctgctcaagt

SEQ ID NO: 1900449 - DNA, 15 bp, Homo sapiens
caatctgctcaagtg

SEQ ID NO: 1900450 - DNA, 15 bp, Homo sapiens
aatctgctcaagtga

SEQ ID NO: 1900451 - DNA, 15 bp, Homo sapiens
atctgctcaagtgat

SEQ ID NO: 1900452 - DNA, 15 bp, Homo sapiens
tctgctcaagtgatc

SEQ ID NO: 1900453 - DNA, 15 bp, Homo sapiens
ctgctcaagtgatcc

SEQ ID NO: 1900454 - DNA, 15 bp, Homo sapiens
tgctcaagtgatcct

SEQ ID NO: 1900455 - DNA, 15 bp, Homo sapiens
tgcctcagcctccat

SEQ ID NO: 1900456 - DNA, 15 bp, Homo sapiens
gcctcagcctccatg

SEQ ID NO: 1900457 - DNA, 15 bp, Homo sapiens
cctcagcctccatgg

SEQ ID NO: 1900458 - DNA, 15 bp, Homo sapiens
ctcagcctccatggg

SEQ ID NO: 1900459 - DNA, 15 bp, Homo sapiens
tcagcctccatggga

SEQ ID NO: 1900460 - DNA, 15 bp, Homo sapiens
cagcctccatgggac

SEQ ID NO: 1900461 - DNA, 15 bp, Homo sapiens
agcctccatgggact

SEQ ID NO: 1900462 - DNA, 15 bp, Homo sapiens
gcctccatgggacta

SEQ ID NO: 1900463 - DNA, 15 bp, Homo sapiens
cctccatgggactac

SEQ ID NO: 1900464 - DNA, 15 bp, Homo sapiens
ctccatgggactaca

SEQ ID NO: 1900465 - DNA, 15 bp, Homo sapiens
tccatgggactacaa

SEQ ID NO: 1900466 - DNA, 15 bp, Homo sapiens
ccatgggactacaag

SEQ ID NO: 1900467 - DNA, 15 bp, Homo sapiens
catgggactacaagc

SEQ ID NO: 1900468 - DNA, 15 bp, Homo sapiens
atgggactacaagca

SEQ ID NO: 1900469 - DNA, 15 bp, Homo sapiens
tgggactacaagcat

SEQ ID NO: 1900470 - DNA, 15 bp, Homo sapiens
gggactacaagcatg

SEQ ID NO: 1900471 - DNA, 15 bp, Homo sapiens
ggactacaagcatgg

SEQ ID NO: 1900472 - DNA, 15 bp, Homo sapiens
gactacaagcatggg

SEQ ID NO: 1900473 - DNA, 15 bp, Homo sapiens
actacaagcatgggc

SEQ ID NO: 1900474 - DNA, 15 bp, Homo sapiens
ctacaagcatgggcc

SEQ ID NO: 1900475 - DNA, 15 bp, Homo sapiens
tacaagcatgggcca

SEQ ID NO: 1900476 - DNA, 15 bp, Homo sapiens
acaagcatgggccac

SEQ ID NO: 1900477 - DNA, 15 bp, Homo sapiens
caagcatgggccacc

SEQ ID NO: 1900478 - DNA, 15 bp, Homo sapiens
aagcatgggccacca

SEQ ID NO: 1900479 - DNA, 15 bp, Homo sapiens
agcatgggccaccat

SEQ ID NO: 1900480 - DNA, 15 bp, Homo sapiens
gcatgggccaccatg

SEQ ID NO: 1900481 - DNA, 15 bp, Homo sapiens
catgggccaccatgc

SEQ ID NO: 1900482 - DNA, 15 bp, Homo sapiens
atgggccaccatgct

SEQ ID NO: 1900483 - DNA, 15 bp, Homo sapiens
tgggccaccatgcta

SEQ ID NO: 1900484 - DNA, 15 bp, Homo sapiens
gggccaccatgctag

SEQ ID NO: 1900485 - DNA, 15 bp, Homo sapiens
ggccaccatgctagg

SEQ ID NO: 1900486 - DNA, 15 bp, Homo sapiens
gccaccatgctaggc

SEQ ID NO: 1900487 - DNA, 15 bp, Homo sapiens
ccaccatgctaggct

SEQ ID NO: 1900488 - DNA, 15 bp, Homo sapiens
caccatgctaggcta

SEQ ID NO: 1900489 - DNA, 15 bp, Homo sapiens
accatgctaggctaa

SEQ ID NO: 1900490 - DNA, 15 bp, Homo sapiens
ccatgctaggctaat

SEQ ID NO: 1900491 - DNA, 15 bp, Homo sapiens
catgctaggctaatt

SEQ ID NO: 1900492 - DNA, 15 bp, Homo sapiens
atgctaggctaattt

SEQ ID NO: 1900493 - DNA, 15 bp, Homo sapiens
tgctaggctaatttt

SEQ ID NO: 1900494 - DNA, 15 bp, Homo sapiens
gctaggctaatttta

SEQ ID NO: 1900495 - DNA, 15 bp, Homo sapiens
ctaggctaattttaa

SEQ ID NO: 1900496 - DNA, 15 bp, Homo sapiens
taggctaattttaaa

SEQ ID NO: 1900497 - DNA, 15 bp, Homo sapiens
aggctaattttaaaa

SEQ ID NO: 1900498 - DNA, 15 bp, Homo sapiens
ggctaattttaaaaa

SEQ ID NO: 1900499 - DNA, 15 bp, Homo sapiens
gctaattttaaaaaa

SEQ ID NO: 1900500 - DNA, 15 bp, Homo sapiens
ctaattttaaaaaaa

SEQ ID NO: 1900501 - DNA, 15 bp, Homo sapiens
taattttaaaaaaat

SEQ ID NO: 1900502 - DNA, 15 bp, Homo sapiens
aattttaaaaaaatt

SEQ ID NO: 1900503 - DNA, 15 bp, Homo sapiens
attttaaaaaaattt

SEQ ID NO: 1900504 - DNA, 15 bp, Homo sapiens
ttaaaaaaatttttt

SEQ ID NO: 1900505 - DNA, 15 bp, Homo sapiens
taaaaaaattttttt

SEQ ID NO: 1900506 - DNA, 15 bp, Homo sapiens
aaaaaaatttttttg

SEQ ID NO: 1900507 - DNA, 15 bp, Homo sapiens
aaaaaatttttttgt

SEQ ID NO: 1900508 - DNA, 15 bp, Homo sapiens
aaaaatttttttgta

SEQ ID NO: 1900509 - DNA, 15 bp, Homo sapiens
aaaatttttttgtag

SEQ ID NO: 1900510 - DNA, 15 bp, Homo sapiens
aaatttttttgtaga

SEQ ID NO: 1900511 - DNA, 15 bp, Homo sapiens
aatttttttgtagag

SEQ ID NO: 1900512 - DNA, 15 bp, Homo sapiens
atttttttgtagagg

SEQ ID NO: 1900513 - DNA, 15 bp, Homo sapiens
tttttttgtagaggc

SEQ ID NO: 1900514 - DNA, 15 bp, Homo sapiens
ttttttgtagaggca

SEQ ID NO: 1900515 - DNA, 15 bp, Homo sapiens
tttttgtagaggcaa

SEQ ID NO: 1900516 - DNA, 15 bp, Homo sapiens
ttttgtagaggcaag

SEQ ID NO: 1900517 - DNA, 15 bp, Homo sapiens
tttgtagaggcaagg

SEQ ID NO: 1900518 - DNA, 15 bp, Homo sapiens
ttgtagaggcaaggt

SEQ ID NO: 1900519 - DNA, 15 bp, Homo sapiens
tgtagaggcaaggtc

SEQ ID NO: 1900520 - DNA, 15 bp, Homo sapiens
gtagaggcaaggtct

SEQ ID NO: 1900521 - DNA, 15 bp, Homo sapiens
tagaggcaaggtctc

SEQ ID NO: 1900522 - DNA, 15 bp, Homo sapiens
agaggcaaggtctca

SEQ ID NO: 1900523 - DNA, 15 bp, Homo sapiens
gaggcaaggtctcac

SEQ ID NO: 1900524 - DNA, 15 bp, Homo sapiens
aggcaaggtctcacg

SEQ ID NO: 1900525 - DNA, 15 bp, Homo sapiens
ggcaaggtctcacgg

SEQ ID NO: 1900526 - DNA, 15 bp, Homo sapiens
gcaaggtctcacggt

SEQ ID NO: 1900527 - DNA, 15 bp, Homo sapiens
caaggtctcacggtg

SEQ ID NO: 1900528 - DNA, 15 bp, Homo sapiens
aaggtctcacggtgt

SEQ ID NO: 1900529 - DNA, 15 bp, Homo sapiens
aggtctcacggtgtt

SEQ ID NO: 1900530 - DNA, 15 bp, Homo sapiens
ggtctcacggtgttg

SEQ ID NO: 1900531 - DNA, 15 bp, Homo sapiens
gtctcacggtgttgc

SEQ ID NO: 1900532 - DNA, 15 bp, Homo sapiens
tctcacggtgttgcc

SEQ ID NO: 1900533 - DNA, 15 bp, Homo sapiens
ctcacggtgttgccc

SEQ ID NO: 1900534 - DNA, 15 bp, Homo sapiens
tcacggtgttgccca

SEQ ID NO: 1900535 - DNA, 15 bp, Homo sapiens
cacggtgttgcccag

SEQ ID NO: 1900536 - DNA, 15 bp, Homo sapiens
acggtgttgcccagg

SEQ ID NO: 1900537 - DNA, 15 bp, Homo sapiens
cggtgttgcccaggc

SEQ ID NO: 1900538 - DNA, 15 bp, Homo sapiens
ggtgttgcccaggct

SEQ ID NO: 1900539 - DNA, 15 bp, Homo sapiens
tcctgagctcaagca

SEQ ID NO: 1900540 - DNA, 15 bp, Homo sapiens
cctgagctcaagcaa

SEQ ID NO: 1900541 - DNA, 15 bp, Homo sapiens
ctgagctcaagcaat

SEQ ID NO: 1900542 - DNA, 15 bp, Homo sapiens
tgagctcaagcaatc

SEQ ID NO: 1900543 - DNA, 15 bp, Homo sapiens
gagctcaagcaatcc

SEQ ID NO: 1900544 - DNA, 15 bp, Homo sapiens
agctcaagcaatccc

SEQ ID NO: 1900545 - DNA, 15 bp, Homo sapiens
gctcaagcaatccct

SEQ ID NO: 1900546 - DNA, 15 bp, Homo sapiens
ctcaagcaatccctc

SEQ ID NO: 1900547 - DNA, 15 bp, Homo sapiens
tcaagcaatccctct

SEQ ID NO: 1900548 - DNA, 15 bp, Homo sapiens
caagcaatccctctt

SEQ ID NO: 1900549 - DNA, 15 bp, Homo sapiens
aagcaatccctcttc

SEQ ID NO: 1900550 - DNA, 15 bp, Homo sapiens
agcaatccctcttcc

SEQ ID NO: 1900551 - DNA, 15 bp, Homo sapiens
gcaatccctcttcca

SEQ ID NO: 1900552 - DNA, 15 bp, Homo sapiens
caatccctcttccac

SEQ ID NO: 1900553 - DNA, 15 bp, Homo sapiens
aatccctcttccacc

SEQ ID NO: 1900554 - DNA, 15 bp, Homo sapiens
atccctcttccacct

SEQ ID NO: 1900555 - DNA, 15 bp, Homo sapiens
tccctcttccacctt

SEQ ID NO: 1900556 - DNA, 15 bp, Homo sapiens
ccctcttccaccttg

SEQ ID NO: 1900557 - DNA, 15 bp, Homo sapiens
cctcttccaccttgg

SEQ ID NO: 1900558 - DNA, 15 bp, Homo sapiens
ctcttccaccttggc

SEQ ID NO: 1900559 - DNA, 15 bp, Homo sapiens
tcttccaccttggcc

SEQ ID NO: 1900560 - DNA, 15 bp, Homo sapiens
cttccaccttggcct

SEQ ID NO: 1900561 - DNA, 15 bp, Homo sapiens
ttccaccttggcctc

SEQ ID NO: 1900562 - DNA, 15 bp, Homo sapiens
tccaccttggcctct

SEQ ID NO: 1900563 - DNA, 15 bp, Homo sapiens
ccaccttggcctctc

SEQ ID NO: 1900564 - DNA, 15 bp, Homo sapiens
caccttggcctctca

SEQ ID NO: 1900565 - DNA, 15 bp, Homo sapiens
accttggcctctcaa

SEQ ID NO: 1900566 - DNA, 15 bp, Homo sapiens
cctctcaaagtgcta

SEQ ID NO: 1900567 - DNA, 15 bp, Homo sapiens
ctctcaaagtgctag

SEQ ID NO: 1900568 - DNA, 15 bp, Homo sapiens
tctcaaagtgctaga

SEQ ID NO: 1900569 - DNA, 15 bp, Homo sapiens
ctcaaagtgctagaa

SEQ ID NO: 1900570 - DNA, 15 bp, Homo sapiens
tcaaagtgctagaat

SEQ ID NO: 1900571 - DNA, 15 bp, Homo sapiens
aagtgctagaattat

SEQ ID NO: 1900572 - DNA, 15 bp, Homo sapiens
agtgctagaattata

SEQ ID NO: 1900573 - DNA, 15 bp, Homo sapiens
gtgctagaattatag

SEQ ID NO: 1900574 - DNA, 15 bp, Homo sapiens
tgctagaattatagg

SEQ ID NO: 1900575 - DNA, 15 bp, Homo sapiens
gctagaattataggc

SEQ ID NO: 1900576 - DNA, 15 bp, Homo sapiens
ctagaattataggca

SEQ ID NO: 1900577 - DNA, 15 bp, Homo sapiens
tagaattataggcat

SEQ ID NO: 1900578 - DNA, 15 bp, Homo sapiens
agaattataggcatg

SEQ ID NO: 1900579 - DNA, 15 bp, Homo sapiens
ccaccatgcctggcc

SEQ ID NO: 1900580 - DNA, 15 bp, Homo sapiens
accatgcctggcctt

SEQ ID NO: 1900581 - DNA, 15 bp, Homo sapiens
ccatgcctggccttt

SEQ ID NO: 1900582 - DNA, 15 bp, Homo sapiens
catgcctggccttta

SEQ ID NO: 1900583 - DNA, 15 bp, Homo sapiens
atgcctggcctttac

SEQ ID NO: 1900584 - DNA, 15 bp, Homo sapiens
tgcctggcctttact

SEQ ID NO: 1900585 - DNA, 15 bp, Homo sapiens
gcctggcctttactt

SEQ ID NO: 1900586 - DNA, 15 bp, Homo sapiens
cctggcctttacttc

SEQ ID NO: 1900587 - DNA, 15 bp, Homo sapiens
ctggcctttacttct

SEQ ID NO: 1900588 - DNA, 15 bp, Homo sapiens
tggcctttacttctt

SEQ ID NO: 1900589 - DNA, 15 bp, Homo sapiens
ggcctttacttcttt

SEQ ID NO: 1900590 - DNA, 15 bp, Homo sapiens
gcctttacttctttc

SEQ ID NO: 1900591 - DNA, 15 bp, Homo sapiens
cctttacttctttca

SEQ ID NO: 1900592 - DNA, 15 bp, Homo sapiens
ctttacttctttcat

SEQ ID NO: 1900593 - DNA, 15 bp, Homo sapiens
tttacttctttcata

SEQ ID NO: 1900594 - DNA, 15 bp, Homo sapiens
ttacttctttcatat

SEQ ID NO: 1900595 - DNA, 15 bp, Homo sapiens
tacttctttcatata

SEQ ID NO: 1900596 - DNA, 15 bp, Homo sapiens
acttctttcatatat

SEQ ID NO: 1900597 - DNA, 15 bp, Homo sapiens
cttctttcatatatt

SEQ ID NO: 1900598 - DNA, 15 bp, Homo sapiens
ttctttcatatattc

SEQ ID NO: 1900599 - DNA, 15 bp, Homo sapiens
tctttcatatattca

SEQ ID NO: 1900600 - DNA, 15 bp, Homo sapiens
ctttcatatattcaa

SEQ ID NO: 1900601 - DNA, 15 bp, Homo sapiens
tttcatatattcaaa

SEQ ID NO: 1900602 - DNA, 15 bp, Homo sapiens
ttcatatattcaaat

SEQ ID NO: 1900603 - DNA, 15 bp, Homo sapiens
tcatatattcaaatt

SEQ ID NO: 1900604 - DNA, 15 bp, Homo sapiens
catatattcaaattt

SEQ ID NO: 1900605 - DNA, 15 bp, Homo sapiens
atatattcaaatttt

SEQ ID NO: 1900606 - DNA, 15 bp, Homo sapiens
tatattcaaattttg

SEQ ID NO: 1900607 - DNA, 15 bp, Homo sapiens
atattcaaattttgt

SEQ ID NO: 1900608 - DNA, 15 bp, Homo sapiens
tattcaaattttgtc

SEQ ID NO: 1900609 - DNA, 15 bp, Homo sapiens
attcaaattttgtca

SEQ ID NO: 1900610 - DNA, 15 bp, Homo sapiens
ttcaaattttgtcat

SEQ ID NO: 1900611 - DNA, 15 bp, Homo sapiens
tcaaattttgtcata

SEQ ID NO: 1900612 - DNA, 15 bp, Homo sapiens
caaattttgtcatat

SEQ ID NO: 1900613 - DNA, 15 bp, Homo sapiens
aaattttgtcatatt

SEQ ID NO: 1900614 - DNA, 15 bp, Homo sapiens
aattttgtcatatta

SEQ ID NO: 1900615 - DNA, 15 bp, Homo sapiens
attttgtcatattag

SEQ ID NO: 1900616 - DNA, 15 bp, Homo sapiens
ttttgtcatattagt

SEQ ID NO: 1900617 - DNA, 15 bp, Homo sapiens
tttgtcatattagta

SEQ ID NO: 1900618 - DNA, 15 bp, Homo sapiens
ttgtcatattagtag

SEQ ID NO: 1900619 - DNA, 15 bp, Homo sapiens
tgtcatattagtagg

SEQ ID NO: 1900620 - DNA, 15 bp, Homo sapiens
gtcatattagtaggg

SEQ ID NO: 1900621 - DNA, 15 bp, Homo sapiens
tcatattagtaggga

SEQ ID NO: 1900622 - DNA, 15 bp, Homo sapiens
catattagtagggaa

SEQ ID NO: 1900623 - DNA, 15 bp, Homo sapiens
atattagtagggaac

SEQ ID NO: 1900624 - DNA, 15 bp, Homo sapiens
tattagtagggaact

SEQ ID NO: 1900625 - DNA, 15 bp, Homo sapiens
attagtagggaacta

SEQ ID NO: 1900626 - DNA, 15 bp, Homo sapiens
ttagtagggaactat

SEQ ID NO: 1900627 - DNA, 15 bp, Homo sapiens
tagtagggaactata

SEQ ID NO: 1900628 - DNA, 15 bp, Homo sapiens
agtagggaactataa

SEQ ID NO: 1900629 - DNA, 15 bp, Homo sapiens
gtagggaactataac

SEQ ID NO: 1900630 - DNA, 15 bp, Homo sapiens
tagggaactataact

SEQ ID NO: 1900631 - DNA, 15 bp, Homo sapiens
agggaactataactc

SEQ ID NO: 1900632 - DNA, 15 bp, Homo sapiens
gggaactataactca

SEQ ID NO: 1900633 - DNA, 15 bp, Homo sapiens
ggaactataactcaa

SEQ ID NO: 1900634 - DNA, 15 bp, Homo sapiens
gaactataactcaag

SEQ ID NO: 1900635 - DNA, 15 bp, Homo sapiens
aactataactcaagt

SEQ ID NO: 1900636 - DNA, 15 bp, Homo sapiens
actataactcaagtt

SEQ ID NO: 1900637 - DNA, 15 bp, Homo sapiens
ctataactcaagttt

SEQ ID NO: 1900638 - DNA, 15 bp, Homo sapiens
tataactcaagtttt

SEQ ID NO: 1900639 - DNA, 15 bp, Homo sapiens
ataactcaagttttc

SEQ ID NO: 1900640 - DNA, 15 bp, Homo sapiens
taactcaagttttct

SEQ ID NO: 1900641 - DNA, 15 bp, Homo sapiens
aactcaagttttctt

SEQ ID NO: 1900642 - DNA, 15 bp, Homo sapiens
actcaagttttctta

SEQ ID NO: 1900643 - DNA, 15 bp, Homo sapiens
ctcaagttttcttat

SEQ ID NO: 1900644 - DNA, 15 bp, Homo sapiens
tcaagttttcttata

SEQ ID NO: 1900645 - DNA, 15 bp, Homo sapiens
caagttttcttatag

SEQ ID NO: 1900646 - DNA, 15 bp, Homo sapiens
aagttttcttataga

SEQ ID NO: 1900647 - DNA, 15 bp, Homo sapiens
agttttcttatagat

SEQ ID NO: 1900648 - DNA, 15 bp, Homo sapiens
gttttcttatagatt

SEQ ID NO: 1900649 - DNA, 15 bp, Homo sapiens
ttttcttatagattg

SEQ ID NO: 1900650 - DNA, 15 bp, Homo sapiens
tttcttatagattga

SEQ ID NO: 1900651 - DNA, 15 bp, Homo sapiens
ttcttatagattgat

SEQ ID NO: 1900652 - DNA, 15 bp, Homo sapiens
tcttatagattgatg

SEQ ID NO: 1900653 - DNA, 15 bp, Homo sapiens
cttatagattgatgt

SEQ ID NO: 1900654 - DNA, 15 bp, Homo sapiens
ttatagattgatgtt

SEQ ID NO: 1900655 - DNA, 15 bp, Homo sapiens
tatagattgatgttc

SEQ ID NO: 1900656 - DNA, 15 bp, Homo sapiens
atagattgatgttca

SEQ ID NO: 1900657 - DNA, 15 bp, Homo sapiens
tagattgatgttcat

SEQ ID NO: 1900658 - DNA, 15 bp, Homo sapiens
agattgatgttcatt

SEQ ID NO: 1900659 - DNA, 15 bp, Homo sapiens
gattgatgttcattt

SEQ ID NO: 1900660 - DNA, 15 bp, Homo sapiens
attgatgttcatttt

SEQ ID NO: 1900661 - DNA, 15 bp, Homo sapiens
ttgatgttcattttt

SEQ ID NO: 1900662 - DNA, 15 bp, Homo sapiens
tgatgttcattttta

SEQ ID NO: 1900663 - DNA, 15 bp, Homo sapiens
gatgttcatttttac

SEQ ID NO: 1900664 - DNA, 15 bp, Homo sapiens
atgttcatttttaca

SEQ ID NO: 1900665 - DNA, 15 bp, Homo sapiens
tgttcatttttacaa

SEQ ID NO: 1900666 - DNA, 15 bp, Homo sapiens
gttcatttttacaag

SEQ ID NO: 1900667 - DNA, 15 bp, Homo sapiens
ttcatttttacaagc

SEQ ID NO: 1900668 - DNA, 15 bp, Homo sapiens
tcatttttacaagct

SEQ ID NO: 1900669 - DNA, 15 bp, Homo sapiens
catttttacaagctt

SEQ ID NO: 1900670 - DNA, 15 bp, Homo sapiens
atttttacaagcttg

SEQ ID NO: 1900671 - DNA, 15 bp, Homo sapiens
tttttacaagcttga

SEQ ID NO: 1900672 - DNA, 15 bp, Homo sapiens
ttttacaagcttgat

SEQ ID NO: 1900673 - DNA, 15 bp, Homo sapiens
tttacaagcttgatc

SEQ ID NO: 1900674 - DNA, 15 bp, Homo sapiens
ttacaagcttgatcg

SEQ ID NO: 1900675 - DNA, 15 bp, Homo sapiens
tacaagcttgatcgt

SEQ ID NO: 1900676 - DNA, 15 bp, Homo sapiens
acaagcttgatcgtc

SEQ ID NO: 1900677 - DNA, 15 bp, Homo sapiens
caagcttgatcgtca

SEQ ID NO: 1900678 - DNA, 15 bp, Homo sapiens
aagcttgatcgtcat

SEQ ID NO: 1900679 - DNA, 15 bp, Homo sapiens
agcttgatcgtcatt

SEQ ID NO: 1900680 - DNA, 15 bp, Homo sapiens
gcttgatcgtcattg

SEQ ID NO: 1900681 - DNA, 15 bp, Homo sapiens
cttgatcgtcattgg

SEQ ID NO: 1900682 - DNA, 15 bp, Homo sapiens
ttgatcgtcattggt

SEQ ID NO: 1900683 - DNA, 15 bp, Homo sapiens
tgatcgtcattggtt

SEQ ID NO: 1900684 - DNA, 15 bp, Homo sapiens
gatcgtcattggttt

SEQ ID NO: 1900685 - DNA, 15 bp, Homo sapiens
atcgtcattggtttt

SEQ ID NO: 1900686 - DNA, 15 bp, Homo sapiens
tcgtcattggttttt

SEQ ID NO: 1900687 - DNA, 15 bp, Homo sapiens
cgtcattggttttta

SEQ ID NO: 1900688 - DNA, 15 bp, Homo sapiens
gtcattggtttttaa

SEQ ID NO: 1900689 - DNA, 15 bp, Homo sapiens
tcattggtttttaat

SEQ ID NO: 1900690 - DNA, 15 bp, Homo sapiens
cattggtttttaatt

SEQ ID NO: 1900691 - DNA, 15 bp, Homo sapiens
attggtttttaattt

SEQ ID NO: 1900692 - DNA, 15 bp, Homo sapiens
ttggtttttaatttt

SEQ ID NO: 1900693 - DNA, 15 bp, Homo sapiens
tggtttttaatttta

SEQ ID NO: 1900694 - DNA, 15 bp, Homo sapiens
ggtttttaattttaa

SEQ ID NO: 1900695 - DNA, 15 bp, Homo sapiens
gtttttaattttaaa

SEQ ID NO: 1900696 - DNA, 15 bp, Homo sapiens
tttttaattttaaag

SEQ ID NO: 1900697 - DNA, 15 bp, Homo sapiens
ttttaattttaaagc

SEQ ID NO: 1900698 - DNA, 15 bp, Homo sapiens
tttaattttaaagca

SEQ ID NO: 1900699 - DNA, 15 bp, Homo sapiens
ttaattttaaagcaa

SEQ ID NO: 1900700 - DNA, 15 bp, Homo sapiens
taattttaaagcaaa

SEQ ID NO: 1900701 - DNA, 15 bp, Homo sapiens
aattttaaagcaaat

SEQ ID NO: 1900702 - DNA, 15 bp, Homo sapiens
attttaaagcaaatc

SEQ ID NO: 1900703 - DNA, 15 bp, Homo sapiens
ttttaaagcaaatcc

SEQ ID NO: 1900704 - DNA, 15 bp, Homo sapiens
tttaaagcaaatcct

SEQ ID NO: 1900705 - DNA, 15 bp, Homo sapiens
ttaaagcaaatcctg

SEQ ID NO: 1900706 - DNA, 15 bp, Homo sapiens
taaagcaaatcctgt

SEQ ID NO: 1900707 - DNA, 15 bp, Homo sapiens
aaagcaaatcctgtt

SEQ ID NO: 1900708 - DNA, 15 bp, Homo sapiens
aagcaaatcctgtta

SEQ ID NO: 1900709 - DNA, 15 bp, Homo sapiens
agcaaatcctgttat

SEQ ID NO: 1900710 - DNA, 15 bp, Homo sapiens
gcaaatcctgttata

SEQ ID NO: 1900711 - DNA, 15 bp, Homo sapiens
caaatcctgttatat

SEQ ID NO: 1900712 - DNA, 15 bp, Homo sapiens
aaatcctgttatatg

SEQ ID NO: 1900713 - DNA, 15 bp, Homo sapiens
aatcctgttatatgt

SEQ ID NO: 1900714 - DNA, 15 bp, Homo sapiens
atcctgttatatgta

SEQ ID NO: 1900715 - DNA, 15 bp, Homo sapiens
tcctgttatatgtaa

SEQ ID NO: 1900716 - DNA, 15 bp, Homo sapiens
cctgttatatgtaat

SEQ ID NO: 1900717 - DNA, 15 bp, Homo sapiens
ctgttatatgtaatt

SEQ ID NO: 1900718 - DNA, 15 bp, Homo sapiens
tgttatatgtaattg

SEQ ID NO: 1900719 - DNA, 15 bp, Homo sapiens
gttatatgtaattga

SEQ ID NO: 1900720 - DNA, 15 bp, Homo sapiens
ttatatgtaattgaa

SEQ ID NO: 1900721 - DNA, 15 bp, Homo sapiens
tatatgtaattgaac

SEQ ID NO: 1900722 - DNA, 15 bp, Homo sapiens
atatgtaattgaaca

SEQ ID NO: 1900723 - DNA, 15 bp, Homo sapiens
tatgtaattgaacat

SEQ ID NO: 1900724 - DNA, 15 bp, Homo sapiens
atgtaattgaacatt

SEQ ID NO: 1900725 - DNA, 15 bp, Homo sapiens
tgtaattgaacatta

SEQ ID NO: 1900726 - DNA, 15 bp, Homo sapiens
gtaattgaacattac

SEQ ID NO: 1900727 - DNA, 15 bp, Homo sapiens
taattgaacattaca

SEQ ID NO: 1900728 - DNA, 15 bp, Homo sapiens
aattgaacattacag

SEQ ID NO: 1900729 - DNA, 15 bp, Homo sapiens
attgaacattacagt

SEQ ID NO: 1900730 - DNA, 15 bp, Homo sapiens
ttgaacattacagta

SEQ ID NO: 1900731 - DNA, 15 bp, Homo sapiens
tgaacattacagtaa

SEQ ID NO: 1900732 - DNA, 15 bp, Homo sapiens
gaacattacagtaat

SEQ ID NO: 1900733 - DNA, 15 bp, Homo sapiens
aacattacagtaatt

SEQ ID NO: 1900734 - DNA, 15 bp, Homo sapiens
acattacagtaatta

SEQ ID NO: 1900735 - DNA, 15 bp, Homo sapiens
cattacagtaattat

SEQ ID NO: 1900736 - DNA, 15 bp, Homo sapiens
attacagtaattata

SEQ ID NO: 1900737 - DNA, 15 bp, Homo sapiens
ttacagtaattatag

SEQ ID NO: 1900738 - DNA, 15 bp, Homo sapiens
tacagtaattatagt

SEQ ID NO: 1900739 - DNA, 15 bp, Homo sapiens
acagtaattatagta

SEQ ID NO: 1900740 - DNA, 15 bp, Homo sapiens
cagtaattatagtaa

SEQ ID NO: 1900741 - DNA, 15 bp, Homo sapiens
agtaattatagtaat

SEQ ID NO: 1900742 - DNA, 15 bp, Homo sapiens
gtaattatagtaatt

SEQ ID NO: 1900743 - DNA, 15 bp, Homo sapiens
taattatagtaattt

SEQ ID NO: 1900744 - DNA, 15 bp, Homo sapiens
aattatagtaatttg

SEQ ID NO: 1900745 - DNA, 15 bp, Homo sapiens
attatagtaatttgt

SEQ ID NO: 1900746 - DNA, 15 bp, Homo sapiens
ttatagtaatttgtt

SEQ ID NO: 1900747 - DNA, 15 bp, Homo sapiens
tatagtaatttgttt

SEQ ID NO: 1900748 - DNA, 15 bp, Homo sapiens
atagtaatttgtttc

SEQ ID NO: 1900749 - DNA, 15 bp, Homo sapiens
tagtaatttgtttca

SEQ ID NO: 1900750 - DNA, 15 bp, Homo sapiens
agtaatttgtttcag

SEQ ID NO: 1900751 - DNA, 15 bp, Homo sapiens
gtaatttgtttcaga

SEQ ID NO: 1900752 - DNA, 15 bp, Homo sapiens
taatttgtttcagat

SEQ ID NO: 1900753 - DNA, 15 bp, Homo sapiens
aatttgtttcagatt

SEQ ID NO: 1900754 - DNA, 15 bp, Homo sapiens
atttgtttcagattg

SEQ ID NO: 1900755 - DNA, 15 bp, Homo sapiens
tttgtttcagattgg

SEQ ID NO: 1900756 - DNA, 15 bp, Homo sapiens
ttgtttcagattggg

SEQ ID NO: 1900757 - DNA, 15 bp, Homo sapiens
tgtttcagattgggc

SEQ ID NO: 1900758 - DNA, 15 bp, Homo sapiens
gtttcagattgggca

SEQ ID NO: 1900759 - DNA, 15 bp, Homo sapiens
tttcagattgggcac

SEQ ID NO: 1900760 - DNA, 15 bp, Homo sapiens
ttcagattgggcact

SEQ ID NO: 1900761 - DNA, 15 bp, Homo sapiens
tcagattgggcactc

SEQ ID NO: 1900762 - DNA, 15 bp, Homo sapiens
cagattgggcactca

SEQ ID NO: 1900763 - DNA, 15 bp, Homo sapiens
agattgggcactcaa

SEQ ID NO: 1900764 - DNA, 15 bp, Homo sapiens
gattgggcactcaag

SEQ ID NO: 1900765 - DNA, 15 bp, Homo sapiens
attgggcactcaagt

SEQ ID NO: 1900766 - DNA, 15 bp, Homo sapiens
ttgggcactcaagtg

SEQ ID NO: 1900767 - DNA, 15 bp, Homo sapiens
tgggcactcaagtgt

SEQ ID NO: 1900768 - DNA, 15 bp, Homo sapiens
gggcactcaagtgtt

SEQ ID NO: 1900769 - DNA, 15 bp, Homo sapiens
ggcactcaagtgtta

SEQ ID NO: 1900770 - DNA, 15 bp, Homo sapiens
gcactcaagtgttaa

SEQ ID NO: 1900771 - DNA, 15 bp, Homo sapiens
cactcaagtgttaat

SEQ ID NO: 1900772 - DNA, 15 bp, Homo sapiens
actcaagtgttaata

SEQ ID NO: 1900773 - DNA, 15 bp, Homo sapiens
ctcaagtgttaatat

SEQ ID NO: 1900774 - DNA, 15 bp, Homo sapiens
tcaagtgttaatatt

SEQ ID NO: 1900775 - DNA, 15 bp, Homo sapiens
caagtgttaatattt

SEQ ID NO: 1900776 - DNA, 15 bp, Homo sapiens
aagtgttaatatttt

SEQ ID NO: 1900777 - DNA, 15 bp, Homo sapiens
agtgttaatattttg

SEQ ID NO: 1900778 - DNA, 15 bp, Homo sapiens
gtgttaatattttgt

SEQ ID NO: 1900779 - DNA, 15 bp, Homo sapiens
tgttaatattttgtc

SEQ ID NO: 1900780 - DNA, 15 bp, Homo sapiens
gttaatattttgtct

SEQ ID NO: 1900781 - DNA, 15 bp, Homo sapiens
ttaatattttgtctc

SEQ ID NO: 1900782 - DNA, 15 bp, Homo sapiens
taatattttgtctct

SEQ ID NO: 1900783 - DNA, 15 bp, Homo sapiens
aatattttgtctctt

SEQ ID NO: 1900784 - DNA, 15 bp, Homo sapiens
atattttgtctcttt

SEQ ID NO: 1900785 - DNA, 15 bp, Homo sapiens
tattttgtctcttta

SEQ ID NO: 1900786 - DNA, 15 bp, Homo sapiens
attttgtctctttag

SEQ ID NO: 1900787 - DNA, 15 bp, Homo sapiens
ttttgtctctttagg

SEQ ID NO: 1900788 - DNA, 15 bp, Homo sapiens
tttgtctctttagga

SEQ ID NO: 1900789 - DNA, 15 bp, Homo sapiens
ttgtctctttaggaa

SEQ ID NO: 1900790 - DNA, 15 bp, Homo sapiens
tgtctctttaggaaa

SEQ ID NO: 1900791 - DNA, 15 bp, Homo sapiens
gtctctttaggaaat

SEQ ID NO: 1900792 - DNA, 15 bp, Homo sapiens
tctctttaggaaatc

SEQ ID NO: 1900793 - DNA, 15 bp, Homo sapiens
ctctttaggaaatca

SEQ ID NO: 1900794 - DNA, 15 bp, Homo sapiens
tctttaggaaatcaa

SEQ ID NO: 1900795 - DNA, 15 bp, Homo sapiens
ctttaggaaatcaaa

SEQ ID NO: 1900796 - DNA, 15 bp, Homo sapiens
tttaggaaatcaaaa

SEQ ID NO: 1900797 - DNA, 15 bp, Homo sapiens
ttaggaaatcaaaac

SEQ ID NO: 1900798 - DNA, 15 bp, Homo sapiens
taggaaatcaaaact

SEQ ID NO: 1900799 - DNA, 15 bp, Homo sapiens
aggaaatcaaaacta

SEQ ID NO: 1900800 - DNA, 15 bp, Homo sapiens
ggaaatcaaaactag

SEQ ID NO: 1900801 - DNA, 15 bp, Homo sapiens
gaaatcaaaactaga

SEQ ID NO: 1900802 - DNA, 15 bp, Homo sapiens
aaatcaaaactagat

SEQ ID NO: 1900803 - DNA, 15 bp, Homo sapiens
aatcaaaactagatt

SEQ ID NO: 1900804 - DNA, 15 bp, Homo sapiens
atcaaaactagattt

SEQ ID NO: 1900805 - DNA, 15 bp, Homo sapiens
tcaaaactagattta

SEQ ID NO: 1900806 - DNA, 15 bp, Homo sapiens
caaaactagatttat

SEQ ID NO: 1900807 - DNA, 15 bp, Homo sapiens
aaaactagatttata

SEQ ID NO: 1900808 - DNA, 15 bp, Homo sapiens
aaactagatttatat

SEQ ID NO: 1900809 - DNA, 15 bp, Homo sapiens
aactagatttatata

SEQ ID NO: 1900810 - DNA, 15 bp, Homo sapiens
actagatttatatat

SEQ ID NO: 1900811 - DNA, 15 bp, Homo sapiens
ctagatttatatata

SEQ ID NO: 1900812 - DNA, 15 bp, Homo sapiens
tagatttatatatag

SEQ ID NO: 1900813 - DNA, 15 bp, Homo sapiens
agatttatatataga

SEQ ID NO: 1900814 - DNA, 15 bp, Homo sapiens
gatttatatatagac

SEQ ID NO: 1900815 - DNA, 15 bp, Homo sapiens
atttatatatagact

SEQ ID NO: 1900816 - DNA, 15 bp, Homo sapiens
tttatatatagactt

SEQ ID NO: 1900817 - DNA, 15 bp, Homo sapiens
ttatatatagacttc

SEQ ID NO: 1900818 - DNA, 15 bp, Homo sapiens
tatatatagacttct

SEQ ID NO: 1900819 - DNA, 15 bp, Homo sapiens
atatatagacttctt

SEQ ID NO: 1900820 - DNA, 15 bp, Homo sapiens
tatatagacttctta

SEQ ID NO: 1900821 - DNA, 15 bp, Homo sapiens
atatagacttcttat

SEQ ID NO: 1900822 - DNA, 15 bp, Homo sapiens
tatagacttcttatt

SEQ ID NO: 1900823 - DNA, 15 bp, Homo sapiens
atagacttcttattg

SEQ ID NO: 1900824 - DNA, 15 bp, Homo sapiens
tagacttcttattgc

SEQ ID NO: 1900825 - DNA, 15 bp, Homo sapiens
agacttcttattgca

SEQ ID NO: 1900826 - DNA, 15 bp, Homo sapiens
gacttcttattgcaa

SEQ ID NO: 1900827 - DNA, 15 bp, Homo sapiens
acttcttattgcaag

SEQ ID NO: 1900828 - DNA, 15 bp, Homo sapiens
cttcttattgcaagt

SEQ ID NO: 1900829 - DNA, 15 bp, Homo sapiens
ttcttattgcaagta

SEQ ID NO: 1900830 - DNA, 15 bp, Homo sapiens
tcttattgcaagtat

SEQ ID NO: 1900831 - DNA, 15 bp, Homo sapiens
cttattgcaagtatc

SEQ ID NO: 1900832 - DNA, 15 bp, Homo sapiens
ttattgcaagtatct

SEQ ID NO: 1900833 - DNA, 15 bp, Homo sapiens
tattgcaagtatcta

SEQ ID NO: 1900834 - DNA, 15 bp, Homo sapiens
attgcaagtatctag

SEQ ID NO: 1900835 - DNA, 15 bp, Homo sapiens
ttgcaagtatctagt

SEQ ID NO: 1900836 - DNA, 15 bp, Homo sapiens
tgcaagtatctagtc

SEQ ID NO: 1900837 - DNA, 15 bp, Homo sapiens
gcaagtatctagtct

SEQ ID NO: 1900838 - DNA, 15 bp, Homo sapiens
caagtatctagtctt

SEQ ID NO: 1900839 - DNA, 15 bp, Homo sapiens
aagtatctagtctta

SEQ ID NO: 1900840 - DNA, 15 bp, Homo sapiens
agtatctagtcttaa

SEQ ID NO: 1900841 - DNA, 15 bp, Homo sapiens
gtatctagtcttaaa

SEQ ID NO: 1900842 - DNA, 15 bp, Homo sapiens
tatctagtcttaaat

SEQ ID NO: 1900843 - DNA, 15 bp, Homo sapiens
atctagtcttaaatc

SEQ ID NO: 1900844 - DNA, 15 bp, Homo sapiens
tctagtcttaaatct

SEQ ID NO: 1900845 - DNA, 15 bp, Homo sapiens
ctagtcttaaatctt

SEQ ID NO: 1900846 - DNA, 15 bp, Homo sapiens
tagtcttaaatctta

SEQ ID NO: 1900847 - DNA, 15 bp, Homo sapiens
agtcttaaatcttac

SEQ ID NO: 1900848 - DNA, 15 bp, Homo sapiens
gtcttaaatcttaca

SEQ ID NO: 1900849 - DNA, 15 bp, Homo sapiens
tcttaaatcttacaa

SEQ ID NO: 1900850 - DNA, 15 bp, Homo sapiens
cttaaatcttacaaa

SEQ ID NO: 1900851 - DNA, 15 bp, Homo sapiens
ttaaatcttacaaag

SEQ ID NO: 1900852 - DNA, 15 bp, Homo sapiens
taaatcttacaaagg

SEQ ID NO: 1900853 - DNA, 15 bp, Homo sapiens
aaatcttacaaaggt

SEQ ID NO: 1900854 - DNA, 15 bp, Homo sapiens
aatcttacaaaggta

SEQ ID NO: 1900855 - DNA, 15 bp, Homo sapiens
atcttacaaaggtac

SEQ ID NO: 1900856 - DNA, 15 bp, Homo sapiens
tcttacaaaggtact

SEQ ID NO: 1900857 - DNA, 15 bp, Homo sapiens
cttacaaaggtacta

SEQ ID NO: 1900858 - DNA, 15 bp, Homo sapiens
ttacaaaggtactat

SEQ ID NO: 1900859 - DNA, 15 bp, Homo sapiens
tacaaaggtactatt

SEQ ID NO: 1900860 - DNA, 15 bp, Homo sapiens
acaaaggtactattt

SEQ ID NO: 1900861 - DNA, 15 bp, Homo sapiens
caaaggtactatttg

SEQ ID NO: 1900862 - DNA, 15 bp, Homo sapiens
aaaggtactatttgg

SEQ ID NO: 1900863 - DNA, 15 bp, Homo sapiens
aaggtactatttgga

SEQ ID NO: 1900864 - DNA, 15 bp, Homo sapiens
aggtactatttggac

SEQ ID NO: 1900865 - DNA, 15 bp, Homo sapiens
ggtactatttggact

SEQ ID NO: 1900866 - DNA, 15 bp, Homo sapiens
gtactatttggactt

SEQ ID NO: 1900867 - DNA, 15 bp, Homo sapiens
tactatttggactta

SEQ ID NO: 1900868 - DNA, 15 bp, Homo sapiens
actatttggacttaa

SEQ ID NO: 1900869 - DNA, 15 bp, Homo sapiens
ctatttggacttaaa

SEQ ID NO: 1900870 - DNA, 15 bp, Homo sapiens
tatttggacttaaaa

SEQ ID NO: 1900871 - DNA, 15 bp, Homo sapiens
atttggacttaaaac

SEQ ID NO: 1900872 - DNA, 15 bp, Homo sapiens
tttggacttaaaact

SEQ ID NO: 1900873 - DNA, 15 bp, Homo sapiens
ttggacttaaaacta

SEQ ID NO: 1900874 - DNA, 15 bp, Homo sapiens
tggacttaaaactat

SEQ ID NO: 1900875 - DNA, 15 bp, Homo sapiens
ggacttaaaactatg

SEQ ID NO: 1900876 - DNA, 15 bp, Homo sapiens
gacttaaaactatga

SEQ ID NO: 1900877 - DNA, 15 bp, Homo sapiens
acttaaaactatgaa

SEQ ID NO: 1900878 - DNA, 15 bp, Homo sapiens
cttaaaactatgaaa

SEQ ID NO: 1900879 - DNA, 15 bp, Homo sapiens
ttaaaactatgaaat

SEQ ID NO: 1900880 - DNA, 15 bp, Homo sapiens
taaaactatgaaatt

SEQ ID NO: 1900881 - DNA, 15 bp, Homo sapiens
aaaactatgaaattg

SEQ ID NO: 1900882 - DNA, 15 bp, Homo sapiens
aaactatgaaattgt

SEQ ID NO: 1900883 - DNA, 15 bp, Homo sapiens
aactatgaaattgtg

SEQ ID NO: 1900884 - DNA, 15 bp, Homo sapiens
actatgaaattgtgt

SEQ ID NO: 1900885 - DNA, 15 bp, Homo sapiens
ctatgaaattgtgtg

SEQ ID NO: 1900886 - DNA, 15 bp, Homo sapiens
tatgaaattgtgtgc

SEQ ID NO: 1900887 - DNA, 15 bp, Homo sapiens
atgaaattgtgtgct

SEQ ID NO: 1900888 - DNA, 15 bp, Homo sapiens
tgaaattgtgtgctt

SEQ ID NO: 1900889 - DNA, 15 bp, Homo sapiens
gaaattgtgtgctta

SEQ ID NO: 1900890 - DNA, 15 bp, Homo sapiens
aaattgtgtgcttac

SEQ ID NO: 1900891 - DNA, 15 bp, Homo sapiens
aattgtgtgcttact

SEQ ID NO: 1900892 - DNA, 15 bp, Homo sapiens
attgtgtgcttacta

SEQ ID NO: 1900893 - DNA, 15 bp, Homo sapiens
ttgtgtgcttactat

SEQ ID NO: 1900894 - DNA, 15 bp, Homo sapiens
tgtgtgcttactata

SEQ ID NO: 1900895 - DNA, 15 bp, Homo sapiens
gtgtgcttactatat

SEQ ID NO: 1900896 - DNA, 15 bp, Homo sapiens
tgtgcttactatata

SEQ ID NO: 1900897 - DNA, 15 bp, Homo sapiens
gtgcttactatataa

SEQ ID NO: 1900898 - DNA, 15 bp, Homo sapiens
tgcttactatataag

SEQ ID NO: 1900899 - DNA, 15 bp, Homo sapiens
gcttactatataagt

SEQ ID NO: 1900900 - DNA, 15 bp, Homo sapiens
cttactatataagtg

SEQ ID NO: 1900901 - DNA, 15 bp, Homo sapiens
ttactatataagtgt

SEQ ID NO: 1900902 - DNA, 15 bp, Homo sapiens
tactatataagtgta

SEQ ID NO: 1900903 - DNA, 15 bp, Homo sapiens
actatataagtgtac

SEQ ID NO: 1900904 - DNA, 15 bp, Homo sapiens
ctatataagtgtact

SEQ ID NO: 1900905 - DNA, 15 bp, Homo sapiens
tatataagtgtactt

SEQ ID NO: 1900906 - DNA, 15 bp, Homo sapiens
atataagtgtactta

SEQ ID NO: 1900907 - DNA, 15 bp, Homo sapiens
tataagtgtacttat

SEQ ID NO: 1900908 - DNA, 15 bp, Homo sapiens
ataagtgtacttatt

SEQ ID NO: 1900909 - DNA, 15 bp, Homo sapiens
taagtgtacttattt

SEQ ID NO: 1900910 - DNA, 15 bp, Homo sapiens
aagtgtacttatttt

SEQ ID NO: 1900911 - DNA, 15 bp, Homo sapiens
agtgtacttattttg

SEQ ID NO: 1900912 - DNA, 15 bp, Homo sapiens
gtgtacttattttga

SEQ ID NO: 1900913 - DNA, 15 bp, Homo sapiens
tgtacttattttgag

SEQ ID NO: 1900914 - DNA, 15 bp, Homo sapiens
gtacttattttgagt

SEQ ID NO: 1900915 - DNA, 15 bp, Homo sapiens
tacttattttgagtt

SEQ ID NO: 1900916 - DNA, 15 bp, Homo sapiens
acttattttgagtta

SEQ ID NO: 1900917 - DNA, 15 bp, Homo sapiens
cttattttgagttat

SEQ ID NO: 1900918 - DNA, 15 bp, Homo sapiens
ttattttgagttatg

SEQ ID NO: 1900919 - DNA, 15 bp, Homo sapiens
tattttgagttatgt

SEQ ID NO: 1900920 - DNA, 15 bp, Homo sapiens
attttgagttatgtt

SEQ ID NO: 1900921 - DNA, 15 bp, Homo sapiens
ttttgagttatgttt

SEQ ID NO: 1900922 - DNA, 15 bp, Homo sapiens
tttgagttatgtttt

SEQ ID NO: 1900923 - DNA, 15 bp, Homo sapiens
ttgagttatgtttta

SEQ ID NO: 1900924 - DNA, 15 bp, Homo sapiens
tgagttatgttttaa

SEQ ID NO: 1900925 - DNA, 15 bp, Homo sapiens
gagttatgttttaaa

SEQ ID NO: 1900926 - DNA, 15 bp, Homo sapiens
agttatgttttaaac

SEQ ID NO: 1900927 - DNA, 15 bp, Homo sapiens
gttatgttttaaact

SEQ ID NO: 1900928 - DNA, 15 bp, Homo sapiens
ttatgttttaaactt

SEQ ID NO: 1900929 - DNA, 15 bp, Homo sapiens
tatgttttaaacttg

SEQ ID NO: 1900930 - DNA, 15 bp, Homo sapiens
atgttttaaacttga

SEQ ID NO: 1900931 - DNA, 15 bp, Homo sapiens
tgttttaaacttgaa

SEQ ID NO: 1900932 - DNA, 15 bp, Homo sapiens
gttttaaacttgaaa

SEQ ID NO: 1900933 - DNA, 15 bp, Homo sapiens
ttttaaacttgaaat

SEQ ID NO: 1900934 - DNA, 15 bp, Homo sapiens
tttaaacttgaaatt

SEQ ID NO: 1900935 - DNA, 15 bp, Homo sapiens
ttaaacttgaaattc

SEQ ID NO: 1900936 - DNA, 15 bp, Homo sapiens
taaacttgaaattcc

SEQ ID NO: 1900937 - DNA, 15 bp, Homo sapiens
aaacttgaaattcca

SEQ ID NO: 1900938 - DNA, 15 bp, Homo sapiens
aacttgaaattccat

SEQ ID NO: 1900939 - DNA, 15 bp, Homo sapiens
acttgaaattccatt

SEQ ID NO: 1900940 - DNA, 15 bp, Homo sapiens
cttgaaattccattc

SEQ ID NO: 1900941 - DNA, 15 bp, Homo sapiens
ttgaaattccattct

SEQ ID NO: 1900942 - DNA, 15 bp, Homo sapiens
tgaaattccattctt

SEQ ID NO: 1900943 - DNA, 15 bp, Homo sapiens
gaaattccattctta

SEQ ID NO: 1900944 - DNA, 15 bp, Homo sapiens
aaattccattcttaa

SEQ ID NO: 1900945 - DNA, 15 bp, Homo sapiens
aattccattcttaat

SEQ ID NO: 1900946 - DNA, 15 bp, Homo sapiens
attccattcttaatg

SEQ ID NO: 1900947 - DNA, 15 bp, Homo sapiens
ttccattcttaatgt

SEQ ID NO: 1900948 - DNA, 15 bp, Homo sapiens
tccattcttaatgtc

SEQ ID NO: 1900949 - DNA, 15 bp, Homo sapiens
ccattcttaatgtct

SEQ ID NO: 1900950 - DNA, 15 bp, Homo sapiens
cattcttaatgtcta

SEQ ID NO: 1900951 - DNA, 15 bp, Homo sapiens
attcttaatgtctag

SEQ ID NO: 1900952 - DNA, 15 bp, Homo sapiens
ttcttaatgtctaga

SEQ ID NO: 1900953 - DNA, 15 bp, Homo sapiens
tcttaatgtctagag

SEQ ID NO: 1900954 - DNA, 15 bp, Homo sapiens
cttaatgtctagagt

SEQ ID NO: 1900955 - DNA, 15 bp, Homo sapiens
ttaatgtctagagta

SEQ ID NO: 1900956 - DNA, 15 bp, Homo sapiens
taatgtctagagtaa

SEQ ID NO: 1900957 - DNA, 15 bp, Homo sapiens
aatgtctagagtaat

SEQ ID NO: 1900958 - DNA, 15 bp, Homo sapiens
atgtctagagtaatt

SEQ ID NO: 1900959 - DNA, 15 bp, Homo sapiens
tgtctagagtaatta

SEQ ID NO: 1900960 - DNA, 15 bp, Homo sapiens
gtctagagtaattat

SEQ ID NO: 1900961 - DNA, 15 bp, Homo sapiens
tctagagtaattatg

SEQ ID NO: 1900962 - DNA, 15 bp, Homo sapiens
ctagagtaattatga

SEQ ID NO: 1900963 - DNA, 15 bp, Homo sapiens
tagagtaattatgaa

SEQ ID NO: 1900964 - DNA, 15 bp, Homo sapiens
agagtaattatgaat

SEQ ID NO: 1900965 - DNA, 15 bp, Homo sapiens
gagtaattatgaatg

SEQ ID NO: 1900966 - DNA, 15 bp, Homo sapiens
agtaattatgaatgg

SEQ ID NO: 1900967 - DNA, 15 bp, Homo sapiens
gtaattatgaatggt

SEQ ID NO: 1900968 - DNA, 15 bp, Homo sapiens
taattatgaatggtt

SEQ ID NO: 1900969 - DNA, 15 bp, Homo sapiens
aattatgaatggtta

SEQ ID NO: 1900970 - DNA, 15 bp, Homo sapiens
attatgaatggttaa

SEQ ID NO: 1900971 - DNA, 15 bp, Homo sapiens
ttatgaatggttaaa

SEQ ID NO: 1900972 - DNA, 15 bp, Homo sapiens
tatgaatggttaaat

SEQ ID NO: 1900973 - DNA, 15 bp, Homo sapiens
atgaatggttaaatt

SEQ ID NO: 1900974 - DNA, 15 bp, Homo sapiens
tgaatggttaaatta

SEQ ID NO: 1900975 - DNA, 15 bp, Homo sapiens
gaatggttaaattat

SEQ ID NO: 1900976 - DNA, 15 bp, Homo sapiens
aatggttaaattatg

SEQ ID NO: 1900977 - DNA, 15 bp, Homo sapiens
atggttaaattatga

SEQ ID NO: 1900978 - DNA, 15 bp, Homo sapiens
tggttaaattatgaa

SEQ ID NO: 1900979 - DNA, 15 bp, Homo sapiens
ggttaaattatgaat

SEQ ID NO: 1900980 - DNA, 15 bp, Homo sapiens
gttaaattatgaatg

SEQ ID NO: 1900981 - DNA, 15 bp, Homo sapiens
ttaaattatgaatga

SEQ ID NO: 1900982 - DNA, 15 bp, Homo sapiens
taaattatgaatgac

SEQ ID NO: 1900983 - DNA, 15 bp, Homo sapiens
aaattatgaatgact

SEQ ID NO: 1900984 - DNA, 15 bp, Homo sapiens
aattatgaatgactc

SEQ ID NO: 1900985 - DNA, 15 bp, Homo sapiens
attatgaatgactct

SEQ ID NO: 1900986 - DNA, 15 bp, Homo sapiens
ttatgaatgactcta

SEQ ID NO: 1900987 - DNA, 15 bp, Homo sapiens
tatgaatgactctaa

SEQ ID NO: 1900988 - DNA, 15 bp, Homo sapiens
atgaatgactctaat

SEQ ID NO: 1900989 - DNA, 15 bp, Homo sapiens
tgaatgactctaata

SEQ ID NO: 1900990 - DNA, 15 bp, Homo sapiens
gaatgactctaatag

SEQ ID NO: 1900991 - DNA, 15 bp, Homo sapiens
aatgactctaatagt

SEQ ID NO: 1900992 - DNA, 15 bp, Homo sapiens
atgactctaatagtt

SEQ ID NO: 1900993 - DNA, 15 bp, Homo sapiens
tgactctaatagttt

SEQ ID NO: 1900994 - DNA, 15 bp, Homo sapiens
gactctaatagttta

SEQ ID NO: 1900995 - DNA, 15 bp, Homo sapiens
actctaatagtttaa

SEQ ID NO: 1900996 - DNA, 15 bp, Homo sapiens
ctctaatagtttaaa

SEQ ID NO: 1900997 - DNA, 15 bp, Homo sapiens
tctaatagtttaaag

SEQ ID NO: 1900998 - DNA, 15 bp, Homo sapiens
ctaatagtttaaagc

SEQ ID NO: 1900999 - DNA, 15 bp, Homo sapiens
taatagtttaaagct

SEQ ID NO: 1901000 - DNA, 15 bp, Homo sapiens
aatagtttaaagcta

SEQ ID NO: 1901001 - DNA, 15 bp, Homo sapiens
atagtttaaagctac

SEQ ID NO: 1901002 - DNA, 15 bp, Homo sapiens
tagtttaaagctaca

SEQ ID NO: 1901003 - DNA, 15 bp, Homo sapiens
agtttaaagctacag

SEQ ID NO: 1901004 - DNA, 15 bp, Homo sapiens
gtttaaagctacagt

SEQ ID NO: 1901005 - DNA, 15 bp, Homo sapiens
tttaaagctacagta

SEQ ID NO: 1901006 - DNA, 15 bp, Homo sapiens
ttaaagctacagtat

SEQ ID NO: 1901007 - DNA, 15 bp, Homo sapiens
taaagctacagtatt

SEQ ID NO: 1901008 - DNA, 15 bp, Homo sapiens
aaagctacagtattt

SEQ ID NO: 1901009 - DNA, 15 bp, Homo sapiens
aagctacagtattta

SEQ ID NO: 1901010 - DNA, 15 bp, Homo sapiens
agctacagtatttat

SEQ ID NO: 1901011 - DNA, 15 bp, Homo sapiens
gctacagtatttatt

SEQ ID NO: 1901012 - DNA, 15 bp, Homo sapiens
ctacagtatttattt

SEQ ID NO: 1901013 - DNA, 15 bp, Homo sapiens
tacagtatttattta

SEQ ID NO: 1901014 - DNA, 15 bp, Homo sapiens
acagtatttatttat

SEQ ID NO: 1901015 - DNA, 15 bp, Homo sapiens
cagtatttatttatt

SEQ ID NO: 1901016 - DNA, 15 bp, Homo sapiens
agtatttatttattt

SEQ ID NO: 1901017 - DNA, 15 bp, Homo sapiens
gtatttatttattta

SEQ ID NO: 1901018 - DNA, 15 bp, Homo sapiens
tatttatttatttaa

SEQ ID NO: 1901019 - DNA, 15 bp, Homo sapiens
atttatttatttaat

SEQ ID NO: 1901020 - DNA, 15 bp, Homo sapiens
tatttatttaattta

SEQ ID NO: 1901021 - DNA, 15 bp, Homo sapiens
atttatttaatttat

SEQ ID NO: 1901022 - DNA, 15 bp, Homo sapiens
tttatttaatttatt

SEQ ID NO: 1901023 - DNA, 15 bp, Homo sapiens
ttatttaatttattt

SEQ ID NO: 1901024 - DNA, 15 bp, Homo sapiens
tatttaatttatttt

SEQ ID NO: 1901025 - DNA, 15 bp, Homo sapiens
atttaatttattttt

SEQ ID NO: 1901026 - DNA, 15 bp, Homo sapiens
tttaatttatttttt

SEQ ID NO: 1901027 - DNA, 15 bp, Homo sapiens
ttaatttattttttg

SEQ ID NO: 1901028 - DNA, 15 bp, Homo sapiens
taatttattttttga

SEQ ID NO: 1901029 - DNA, 15 bp, Homo sapiens
aatttattttttgag

SEQ ID NO: 1901030 - DNA, 15 bp, Homo sapiens
gtttcgctcttgtcg

SEQ ID NO: 1901031 - DNA, 15 bp, Homo sapiens
tttcgctcttgtcgc

SEQ ID NO: 1901032 - DNA, 15 bp, Homo sapiens
ttcgctcttgtcgcc

SEQ ID NO: 1901033 - DNA, 15 bp, Homo sapiens
tcgctcttgtcgccc

SEQ ID NO: 1901034 - DNA, 15 bp, Homo sapiens
cgctcttgtcgccca

SEQ ID NO: 1901035 - DNA, 15 bp, Homo sapiens
gctcttgtcgcccag

SEQ ID NO: 1901036 - DNA, 15 bp, Homo sapiens
gagtgtagtggcacc

SEQ ID NO: 1901037 - DNA, 15 bp, Homo sapiens
agtgtagtggcacca

SEQ ID NO: 1901038 - DNA, 15 bp, Homo sapiens
gtgtagtggcaccat

SEQ ID NO: 1901039 - DNA, 15 bp, Homo sapiens
tgtagtggcaccatc

SEQ ID NO: 1901040 - DNA, 15 bp, Homo sapiens
gtagtggcaccatct

SEQ ID NO: 1901041 - DNA, 15 bp, Homo sapiens
tagtggcaccatctt

SEQ ID NO: 1901042 - DNA, 15 bp, Homo sapiens
tggcaccatcttggt

SEQ ID NO: 1901043 - DNA, 15 bp, Homo sapiens
ggcaccatcttggtt

SEQ ID NO: 1901044 - DNA, 15 bp, Homo sapiens
gcaccatcttggttc

SEQ ID NO: 1901045 - DNA, 15 bp, Homo sapiens
caccatcttggttca

SEQ ID NO: 1901046 - DNA, 15 bp, Homo sapiens
accatcttggttcac

SEQ ID NO: 1901047 - DNA, 15 bp, Homo sapiens
ccatcttggttcact

SEQ ID NO: 1901048 - DNA, 15 bp, Homo sapiens
catcttggttcactg

SEQ ID NO: 1901049 - DNA, 15 bp, Homo sapiens
gcaacctctgcctcg

SEQ ID NO: 1901050 - DNA, 15 bp, Homo sapiens
caacctctgcctcgc

SEQ ID NO: 1901051 - DNA, 15 bp, Homo sapiens
aacctctgcctcgcg

SEQ ID NO: 1901052 - DNA, 15 bp, Homo sapiens
acctctgcctcgcgg

SEQ ID NO: 1901053 - DNA, 15 bp, Homo sapiens
cctctgcctcgcggg

SEQ ID NO: 1901054 - DNA, 15 bp, Homo sapiens
ctctgcctcgcgggt

SEQ ID NO: 1901055 - DNA, 15 bp, Homo sapiens
tctgcctcgcgggtt

SEQ ID NO: 1901056 - DNA, 15 bp, Homo sapiens
ctgcctcgcgggttc

SEQ ID NO: 1901057 - DNA, 15 bp, Homo sapiens
tgcctcgcgggttca

SEQ ID NO: 1901058 - DNA, 15 bp, Homo sapiens
gcctcgcgggttcaa

SEQ ID NO: 1901059 - DNA, 15 bp, Homo sapiens
cctcgcgggttcaag

SEQ ID NO: 1901060 - DNA, 15 bp, Homo sapiens
ctcgcgggttcaagt

SEQ ID NO: 1901061 - DNA, 15 bp, Homo sapiens
tcgcgggttcaagtg

SEQ ID NO: 1901062 - DNA, 15 bp, Homo sapiens
cgcgggttcaagtga

SEQ ID NO: 1901063 - DNA, 15 bp, Homo sapiens
gcgggttcaagtgat

SEQ ID NO: 1901064 - DNA, 15 bp, Homo sapiens
tcagcctcccaagtg

SEQ ID NO: 1901065 - DNA, 15 bp, Homo sapiens
cagcctcccaagtgg

SEQ ID NO: 1901066 - DNA, 15 bp, Homo sapiens
agcctcccaagtggc

SEQ ID NO: 1901067 - DNA, 15 bp, Homo sapiens
gcctcccaagtggct

SEQ ID NO: 1901068 - DNA, 15 bp, Homo sapiens
cctcccaagtggctg

SEQ ID NO: 1901069 - DNA, 15 bp, Homo sapiens
ctcccaagtggctgg

SEQ ID NO: 1901070 - DNA, 15 bp, Homo sapiens
tcccaagtggctggg

SEQ ID NO: 1901071 - DNA, 15 bp, Homo sapiens
cccaagtggctggga

SEQ ID NO: 1901072 - DNA, 15 bp, Homo sapiens
ccaagtggctgggat

SEQ ID NO: 1901073 - DNA, 15 bp, Homo sapiens
caagtggctgggatt

SEQ ID NO: 1901074 - DNA, 15 bp, Homo sapiens
aagtggctgggatta

SEQ ID NO: 1901075 - DNA, 15 bp, Homo sapiens
agtggctgggattac

SEQ ID NO: 1901076 - DNA, 15 bp, Homo sapiens
gtggctgggattaca

SEQ ID NO: 1901077 - DNA, 15 bp, Homo sapiens
tggctgggattacag

SEQ ID NO: 1901078 - DNA, 15 bp, Homo sapiens
ggctgggattacagg

SEQ ID NO: 1901079 - DNA, 15 bp, Homo sapiens
ggattacaggtgtat

SEQ ID NO: 1901080 - DNA, 15 bp, Homo sapiens
gattacaggtgtatt

SEQ ID NO: 1901081 - DNA, 15 bp, Homo sapiens
attacaggtgtattt

SEQ ID NO: 1901082 - DNA, 15 bp, Homo sapiens
ttacaggtgtatttc

SEQ ID NO: 1901083 - DNA, 15 bp, Homo sapiens
tacaggtgtatttca

SEQ ID NO: 1901084 - DNA, 15 bp, Homo sapiens
acaggtgtatttcac

SEQ ID NO: 1901085 - DNA, 15 bp, Homo sapiens
caggtgtatttcacc

SEQ ID NO: 1901086 - DNA, 15 bp, Homo sapiens
aggtgtatttcacca

SEQ ID NO: 1901087 - DNA, 15 bp, Homo sapiens
ggtgtatttcaccat

SEQ ID NO: 1901088 - DNA, 15 bp, Homo sapiens
gtgtatttcaccatg

SEQ ID NO: 1901089 - DNA, 15 bp, Homo sapiens
tgtatttcaccatgc

SEQ ID NO: 1901090 - DNA, 15 bp, Homo sapiens
gtatttcaccatgcc

SEQ ID NO: 1901091 - DNA, 15 bp, Homo sapiens
tatttcaccatgcct

SEQ ID NO: 1901092 - DNA, 15 bp, Homo sapiens
atttcaccatgcctg

SEQ ID NO: 1901093 - DNA, 15 bp, Homo sapiens
tttcaccatgcctgg

SEQ ID NO: 1901094 - DNA, 15 bp, Homo sapiens
ttcaccatgcctggc

SEQ ID NO: 1901095 - DNA, 15 bp, Homo sapiens
tcaccatgcctggct

SEQ ID NO: 1901096 - DNA, 15 bp, Homo sapiens
ttagtagagacaggc

SEQ ID NO: 1901097 - DNA, 15 bp, Homo sapiens
tagtagagacaggct

SEQ ID NO: 1901098 - DNA, 15 bp, Homo sapiens
agtagagacaggctt

SEQ ID NO: 1901099 - DNA, 15 bp, Homo sapiens
gtagagacaggcttt

SEQ ID NO: 1901100 - DNA, 15 bp, Homo sapiens
tagagacaggctttt

SEQ ID NO: 1901101 - DNA, 15 bp, Homo sapiens
agagacaggcttttg

SEQ ID NO: 1901102 - DNA, 15 bp, Homo sapiens
gagacaggcttttgc

SEQ ID NO: 1901103 - DNA, 15 bp, Homo sapiens
agacaggcttttgcc

SEQ ID NO: 1901104 - DNA, 15 bp, Homo sapiens
gacaggcttttgcca

SEQ ID NO: 1901105 - DNA, 15 bp, Homo sapiens
acaggcttttgccat

SEQ ID NO: 1901106 - DNA, 15 bp, Homo sapiens
caggcttttgccatg

SEQ ID NO: 1901107 - DNA, 15 bp, Homo sapiens
aggcttttgccatgt

SEQ ID NO: 1901108 - DNA, 15 bp, Homo sapiens
ggcttttgccatgtt

SEQ ID NO: 1901109 - DNA, 15 bp, Homo sapiens
gcttttgccatgtta

SEQ ID NO: 1901110 - DNA, 15 bp, Homo sapiens
cttttgccatgttag

SEQ ID NO: 1901111 - DNA, 15 bp, Homo sapiens
ttttgccatgttagc

SEQ ID NO: 1901112 - DNA, 15 bp, Homo sapiens
tttgccatgttagcc

SEQ ID NO: 1901113 - DNA, 15 bp, Homo sapiens
ttgccatgttagcct

SEQ ID NO: 1901114 - DNA, 15 bp, Homo sapiens
tgccatgttagcctg

SEQ ID NO: 1901115 - DNA, 15 bp, Homo sapiens
gccatgttagcctgg

SEQ ID NO: 1901116 - DNA, 15 bp, Homo sapiens
ccatgttagcctggc

SEQ ID NO: 1901117 - DNA, 15 bp, Homo sapiens
catgttagcctggct

SEQ ID NO: 1901118 - DNA, 15 bp, Homo sapiens
atgttagcctggctg

SEQ ID NO: 1901119 - DNA, 15 bp, Homo sapiens
tgttagcctggctgg

SEQ ID NO: 1901120 - DNA, 15 bp, Homo sapiens
gttagcctggctggt

SEQ ID NO: 1901121 - DNA, 15 bp, Homo sapiens
ttagcctggctggtc

SEQ ID NO: 1901122 - DNA, 15 bp, Homo sapiens
tagcctggctggtct

SEQ ID NO: 1901123 - DNA, 15 bp, Homo sapiens
agcctggctggtctc

SEQ ID NO: 1901124 - DNA, 15 bp, Homo sapiens
gacctcaggtgacct

SEQ ID NO: 1901125 - DNA, 15 bp, Homo sapiens
acctcaggtgaccta

SEQ ID NO: 1901126 - DNA, 15 bp, Homo sapiens
cctcaggtgacctac

SEQ ID NO: 1901127 - DNA, 15 bp, Homo sapiens
ctcaggtgacctacc

SEQ ID NO: 1901128 - DNA, 15 bp, Homo sapiens
tcaggtgacctaccc

SEQ ID NO: 1901129 - DNA, 15 bp, Homo sapiens
caggtgacctaccct

SEQ ID NO: 1901130 - DNA, 15 bp, Homo sapiens
aggtgacctaccctc

SEQ ID NO: 1901131 - DNA, 15 bp, Homo sapiens
ggtgacctaccctcc

SEQ ID NO: 1901132 - DNA, 15 bp, Homo sapiens
gtgacctaccctcct

SEQ ID NO: 1901133 - DNA, 15 bp, Homo sapiens
tgacctaccctcctc

SEQ ID NO: 1901134 - DNA, 15 bp, Homo sapiens
gacctaccctcctca

SEQ ID NO: 1901135 - DNA, 15 bp, Homo sapiens
acctaccctcctcag

SEQ ID NO: 1901136 - DNA, 15 bp, Homo sapiens
cctaccctcctcagc

SEQ ID NO: 1901137 - DNA, 15 bp, Homo sapiens
ctaccctcctcagcc

SEQ ID NO: 1901138 - DNA, 15 bp, Homo sapiens
taccctcctcagcct

SEQ ID NO: 1901139 - DNA, 15 bp, Homo sapiens
accctcctcagcctc

SEQ ID NO: 1901140 - DNA, 15 bp, Homo sapiens
cagcctcccaaggat

SEQ ID NO: 1901141 - DNA, 15 bp, Homo sapiens
agcctcccaaggatt

SEQ ID NO: 1901142 - DNA, 15 bp, Homo sapiens
gcctcccaaggatta

SEQ ID NO: 1901143 - DNA, 15 bp, Homo sapiens
cctcccaaggattac

SEQ ID NO: 1901144 - DNA, 15 bp, Homo sapiens
ctcccaaggattaca

SEQ ID NO: 1901145 - DNA, 15 bp, Homo sapiens
tcccaaggattacaa

SEQ ID NO: 1901146 - DNA, 15 bp, Homo sapiens
cccaaggattacaag

SEQ ID NO: 1901147 - DNA, 15 bp, Homo sapiens
ccaaggattacaagc

SEQ ID NO: 1901148 - DNA, 15 bp, Homo sapiens
caaggattacaagca

SEQ ID NO: 1901149 - DNA, 15 bp, Homo sapiens
aaggattacaagcat

SEQ ID NO: 1901150 - DNA, 15 bp, Homo sapiens
aggattacaagcatg

SEQ ID NO: 1901151 - DNA, 15 bp, Homo sapiens
caagcatgagccacc

SEQ ID NO: 1901152 - DNA, 15 bp, Homo sapiens
ccacacctggcctac

SEQ ID NO: 1901153 - DNA, 15 bp, Homo sapiens
cacacctggcctaca

SEQ ID NO: 1901154 - DNA, 15 bp, Homo sapiens
acacctggcctacag

SEQ ID NO: 1901155 - DNA, 15 bp, Homo sapiens
cacctggcctacagt

SEQ ID NO: 1901156 - DNA, 15 bp, Homo sapiens
acctggcctacagta

SEQ ID NO: 1901157 - DNA, 15 bp, Homo sapiens
cctggcctacagtat

SEQ ID NO: 1901158 - DNA, 15 bp, Homo sapiens
ctggcctacagtatt

SEQ ID NO: 1901159 - DNA, 15 bp, Homo sapiens
tggcctacagtattt

SEQ ID NO: 1901160 - DNA, 15 bp, Homo sapiens
ggcctacagtatttt

SEQ ID NO: 1901161 - DNA, 15 bp, Homo sapiens
gcctacagtatttta

SEQ ID NO: 1901162 - DNA, 15 bp, Homo sapiens
cctacagtattttaa

SEQ ID NO: 1901163 - DNA, 15 bp, Homo sapiens
ctacagtattttaat

SEQ ID NO: 1901164 - DNA, 15 bp, Homo sapiens
tacagtattttaatg

SEQ ID NO: 1901165 - DNA, 15 bp, Homo sapiens
acagtattttaatgt

SEQ ID NO: 1901166 - DNA, 15 bp, Homo sapiens
cagtattttaatgtg

SEQ ID NO: 1901167 - DNA, 15 bp, Homo sapiens
agtattttaatgtgg

SEQ ID NO: 1901168 - DNA, 15 bp, Homo sapiens
gtattttaatgtgga

SEQ ID NO: 1901169 - DNA, 15 bp, Homo sapiens
tattttaatgtggac

SEQ ID NO: 1901170 - DNA, 15 bp, Homo sapiens
attttaatgtggact

SEQ ID NO: 1901171 - DNA, 15 bp, Homo sapiens
ttttaatgtggactc

SEQ ID NO: 1901172 - DNA, 15 bp, Homo sapiens
tttaatgtggactct

SEQ ID NO: 1901173 - DNA, 15 bp, Homo sapiens
ttaatgtggactctc

SEQ ID NO: 1901174 - DNA, 15 bp, Homo sapiens
taatgtggactctct

SEQ ID NO: 1901175 - DNA, 15 bp, Homo sapiens
aatgtggactctctg

SEQ ID NO: 1901176 - DNA, 15 bp, Homo sapiens
atgtggactctctgt

SEQ ID NO: 1901177 - DNA, 15 bp, Homo sapiens
tgtggactctctgtc

SEQ ID NO: 1901178 - DNA, 15 bp, Homo sapiens
gtggactctctgtca

SEQ ID NO: 1901179 - DNA, 15 bp, Homo sapiens
tggactctctgtcat

SEQ ID NO: 1901180 - DNA, 15 bp, Homo sapiens
ggactctctgtcatc

SEQ ID NO: 1901181 - DNA, 15 bp, Homo sapiens
gactctctgtcatcc

SEQ ID NO: 1901182 - DNA, 15 bp, Homo sapiens
actctctgtcatcca

SEQ ID NO: 1901183 - DNA, 15 bp, Homo sapiens
ctctctgtcatccat

SEQ ID NO: 1901184 - DNA, 15 bp, Homo sapiens
tctctgtcatccatt

SEQ ID NO: 1901185 - DNA, 15 bp, Homo sapiens
ctctgtcatccatta

SEQ ID NO: 1901186 - DNA, 15 bp, Homo sapiens
tctgtcatccattat

SEQ ID NO: 1901187 - DNA, 15 bp, Homo sapiens
ctgtcatccattatg

SEQ ID NO: 1901188 - DNA, 15 bp, Homo sapiens
tgtcatccattatgc

SEQ ID NO: 1901189 - DNA, 15 bp, Homo sapiens
gtcatccattatgct

SEQ ID NO: 1901190 - DNA, 15 bp, Homo sapiens
tcatccattatgctg

SEQ ID NO: 1901191 - DNA, 15 bp, Homo sapiens
catccattatgctgt

SEQ ID NO: 1901192 - DNA, 15 bp, Homo sapiens
atccattatgctgtt

SEQ ID NO: 1901193 - DNA, 15 bp, Homo sapiens
tccattatgctgttt

SEQ ID NO: 1901194 - DNA, 15 bp, Homo sapiens
ccattatgctgttta

SEQ ID NO: 1901195 - DNA, 15 bp, Homo sapiens
cattatgctgtttat

SEQ ID NO: 1901196 - DNA, 15 bp, Homo sapiens
attatgctgtttatc

SEQ ID NO: 1901197 - DNA, 15 bp, Homo sapiens
ttatgctgtttatcc

SEQ ID NO: 1901198 - DNA, 15 bp, Homo sapiens
tatgctgtttatcct

SEQ ID NO: 1901199 - DNA, 15 bp, Homo sapiens
atgctgtttatcctg

SEQ ID NO: 1901200 - DNA, 15 bp, Homo sapiens
tgctgtttatcctgt

SEQ ID NO: 1901201 - DNA, 15 bp, Homo sapiens
gctgtttatcctgtg

SEQ ID NO: 1901202 - DNA, 15 bp, Homo sapiens
ctgtttatcctgtgg

SEQ ID NO: 1901203 - DNA, 15 bp, Homo sapiens
tgtttatcctgtggt

SEQ ID NO: 1901204 - DNA, 15 bp, Homo sapiens
gtttatcctgtggtg

SEQ ID NO: 1901205 - DNA, 15 bp, Homo sapiens
tttatcctgtggtga

SEQ ID NO: 1901206 - DNA, 15 bp, Homo sapiens
ttatcctgtggtgaa

SEQ ID NO: 1901207 - DNA, 15 bp, Homo sapiens
tatcctgtggtgaaa

SEQ ID NO: 1901208 - DNA, 15 bp, Homo sapiens
atcctgtggtgaaaa

SEQ ID NO: 1901209 - DNA, 15 bp, Homo sapiens
tcctgtggtgaaaat

SEQ ID NO: 1901210 - DNA, 15 bp, Homo sapiens
cctgtggtgaaaatt

SEQ ID NO: 1901211 - DNA, 15 bp, Homo sapiens
ctgtggtgaaaattt

SEQ ID NO: 1901212 - DNA, 15 bp, Homo sapiens
tgtggtgaaaatttt

SEQ ID NO: 1901213 - DNA, 15 bp, Homo sapiens
gtggtgaaaatttta

SEQ ID NO: 1901214 - DNA, 15 bp, Homo sapiens
tggtgaaaattttat

SEQ ID NO: 1901215 - DNA, 15 bp, Homo sapiens
ggtgaaaattttatg

SEQ ID NO: 1901216 - DNA, 15 bp, Homo sapiens
gtgaaaattttatga

SEQ ID NO: 1901217 - DNA, 15 bp, Homo sapiens
tgaaaattttatgaa

SEQ ID NO: 1901218 - DNA, 15 bp, Homo sapiens
gaaaattttatgaag

SEQ ID NO: 1901219 - DNA, 15 bp, Homo sapiens
aaaattttatgaaga

SEQ ID NO: 1901220 - DNA, 15 bp, Homo sapiens
aaattttatgaagat

SEQ ID NO: 1901221 - DNA, 15 bp, Homo sapiens
aattttatgaagatt

SEQ ID NO: 1901222 - DNA, 15 bp, Homo sapiens
attttatgaagattg

SEQ ID NO: 1901223 - DNA, 15 bp, Homo sapiens
ttttatgaagattga

SEQ ID NO: 1901224 - DNA, 15 bp, Homo sapiens
tttatgaagattgaa

SEQ ID NO: 1901225 - DNA, 15 bp, Homo sapiens
ttatgaagattgaat

SEQ ID NO: 1901226 - DNA, 15 bp, Homo sapiens
tatgaagattgaatg

SEQ ID NO: 1901227 - DNA, 15 bp, Homo sapiens
atgaagattgaatgt

SEQ ID NO: 1901228 - DNA, 15 bp, Homo sapiens
tgaagattgaatgtt

SEQ ID NO: 1901229 - DNA, 15 bp, Homo sapiens
gaagattgaatgttt

SEQ ID NO: 1901230 - DNA, 15 bp, Homo sapiens
aagattgaatgtttt

SEQ ID NO: 1901231 - DNA, 15 bp, Homo sapiens
agattgaatgttttt

SEQ ID NO: 1901232 - DNA, 15 bp, Homo sapiens
gattgaatgtttttc

SEQ ID NO: 1901233 - DNA, 15 bp, Homo sapiens
attgaatgtttttct

SEQ ID NO: 1901234 - DNA, 15 bp, Homo sapiens
ttgaatgtttttctc

SEQ ID NO: 1901235 - DNA, 15 bp, Homo sapiens
tgaatgtttttctct

SEQ ID NO: 1901236 - DNA, 15 bp, Homo sapiens
gaatgtttttctcta

SEQ ID NO: 1901237 - DNA, 15 bp, Homo sapiens
aatgtttttctctag

SEQ ID NO: 1901238 - DNA, 15 bp, Homo sapiens
atgtttttctctagc

SEQ ID NO: 1901239 - DNA, 15 bp, Homo sapiens
tgtttttctctagcg

SEQ ID NO: 1901240 - DNA, 15 bp, Homo sapiens
gtttttctctagcgt

SEQ ID NO: 1901241 - DNA, 15 bp, Homo sapiens
tttttctctagcgtg

SEQ ID NO: 1901242 - DNA, 15 bp, Homo sapiens
ttttctctagcgtga

SEQ ID NO: 1901243 - DNA, 15 bp, Homo sapiens
tttctctagcgtgaa

SEQ ID NO: 1901244 - DNA, 15 bp, Homo sapiens
ttctctagcgtgaat

SEQ ID NO: 1901245 - DNA, 15 bp, Homo sapiens
tctctagcgtgaatt

SEQ ID NO: 1901246 - DNA, 15 bp, Homo sapiens
ctctagcgtgaattg

SEQ ID NO: 1901247 - DNA, 15 bp, Homo sapiens
tctagcgtgaattgc

SEQ ID NO: 1901248 - DNA, 15 bp, Homo sapiens
ctagcgtgaattgct

SEQ ID NO: 1901249 - DNA, 15 bp, Homo sapiens
tagcgtgaattgctt

SEQ ID NO: 1901250 - DNA, 15 bp, Homo sapiens
agcgtgaattgcttt

SEQ ID NO: 1901251 - DNA, 15 bp, Homo sapiens
gcgtgaattgctttc

SEQ ID NO: 1901252 - DNA, 15 bp, Homo sapiens
cgtgaattgctttct

SEQ ID NO: 1901253 - DNA, 15 bp, Homo sapiens
gtgaattgctttctc

SEQ ID NO: 1901254 - DNA, 15 bp, Homo sapiens
tgaattgctttctct

SEQ ID NO: 1901255 - DNA, 15 bp, Homo sapiens
gaattgctttctctt

SEQ ID NO: 1901256 - DNA, 15 bp, Homo sapiens
aattgctttctctta

SEQ ID NO: 1901257 - DNA, 15 bp, Homo sapiens
attgctttctcttac

SEQ ID NO: 1901258 - DNA, 15 bp, Homo sapiens
ttgctttctcttact

SEQ ID NO: 1901259 - DNA, 15 bp, Homo sapiens
tgctttctcttactt

SEQ ID NO: 1901260 - DNA, 15 bp, Homo sapiens
gctttctcttacttt

SEQ ID NO: 1901261 - DNA, 15 bp, Homo sapiens
ctttctcttactttt

SEQ ID NO: 1901262 - DNA, 15 bp, Homo sapiens
tttctcttacttttc

SEQ ID NO: 1901263 - DNA, 15 bp, Homo sapiens
ttctcttacttttct

SEQ ID NO: 1901264 - DNA, 15 bp, Homo sapiens
tctcttacttttctc

SEQ ID NO: 1901265 - DNA, 15 bp, Homo sapiens
ctcttacttttctca

SEQ ID NO: 1901266 - DNA, 15 bp, Homo sapiens
tcttacttttctcat

SEQ ID NO: 1901267 - DNA, 15 bp, Homo sapiens
cttacttttctcatt

SEQ ID NO: 1901268 - DNA, 15 bp, Homo sapiens
ttacttttctcattt

SEQ ID NO: 1901269 - DNA, 15 bp, Homo sapiens
tacttttctcatttt

SEQ ID NO: 1901270 - DNA, 15 bp, Homo sapiens
acttttctcattttt

SEQ ID NO: 1901271 - DNA, 15 bp, Homo sapiens
cttttctcatttttt

SEQ ID NO: 1901272 - DNA, 15 bp, Homo sapiens
ttttctcattttttt

SEQ ID NO: 1901273 - DNA, 15 bp, Homo sapiens
tttctcatttttttc

SEQ ID NO: 1901274 - DNA, 15 bp, Homo sapiens
ttctcatttttttcc

SEQ ID NO: 1901275 - DNA, 15 bp, Homo sapiens
tctcatttttttcct

SEQ ID NO: 1901276 - DNA, 15 bp, Homo sapiens
ctcatttttttcctt

SEQ ID NO: 1901277 - DNA, 15 bp, Homo sapiens
tcatttttttccttc

SEQ ID NO: 1901278 - DNA, 15 bp, Homo sapiens
catttttttccttcc

SEQ ID NO: 1901279 - DNA, 15 bp, Homo sapiens
atttttttccttcct

SEQ ID NO: 1901280 - DNA, 15 bp, Homo sapiens
tttttttccttccta

SEQ ID NO: 1901281 - DNA, 15 bp, Homo sapiens
ttttttccttcctaa

SEQ ID NO: 1901282 - DNA, 15 bp, Homo sapiens
tttttccttcctaat

SEQ ID NO: 1901283 - DNA, 15 bp, Homo sapiens
ttttccttcctaatc

SEQ ID NO: 1901284 - DNA, 15 bp, Homo sapiens
tttccttcctaatct

SEQ ID NO: 1901285 - DNA, 15 bp, Homo sapiens
ttccttcctaatcta

SEQ ID NO: 1901286 - DNA, 15 bp, Homo sapiens
tccttcctaatctac

SEQ ID NO: 1901287 - DNA, 15 bp, Homo sapiens
ccttcctaatctact

SEQ ID NO: 1901288 - DNA, 15 bp, Homo sapiens
cttcctaatctactt

SEQ ID NO: 1901289 - DNA, 15 bp, Homo sapiens
ttcctaatctacttg

SEQ ID NO: 1901290 - DNA, 15 bp, Homo sapiens
tcctaatctacttgc

SEQ ID NO: 1901291 - DNA, 15 bp, Homo sapiens
cctaatctacttgca

SEQ ID NO: 1901292 - DNA, 15 bp, Homo sapiens
ctaatctacttgcag

SEQ ID NO: 1901293 - DNA, 15 bp, Homo sapiens
taatctacttgcaga

SEQ ID NO: 1901294 - DNA, 15 bp, Homo sapiens
aatctacttgcagat

SEQ ID NO: 1901295 - DNA, 15 bp, Homo sapiens
atctacttgcagata

SEQ ID NO: 1901296 - DNA, 15 bp, Homo sapiens
tctacttgcagatac

SEQ ID NO: 1901297 - DNA, 15 bp, Homo sapiens
ctacttgcagatact

SEQ ID NO: 1901298 - DNA, 15 bp, Homo sapiens
tacttgcagatactt

SEQ ID NO: 1901299 - DNA, 15 bp, Homo sapiens
acttgcagatacttc

SEQ ID NO: 1901300 - DNA, 15 bp, Homo sapiens
cttgcagatacttca

SEQ ID NO: 1901301 - DNA, 15 bp, Homo sapiens
ttgcagatacttcag

SEQ ID NO: 1901302 - DNA, 15 bp, Homo sapiens
tgcagatacttcaga

SEQ ID NO: 1901303 - DNA, 15 bp, Homo sapiens
gcagatacttcagat

SEQ ID NO: 1901304 - DNA, 15 bp, Homo sapiens
cagatacttcagatt

SEQ ID NO: 1901305 - DNA, 15 bp, Homo sapiens
agatacttcagatta

SEQ ID NO: 1901306 - DNA, 15 bp, Homo sapiens
gatacttcagattat

SEQ ID NO: 1901307 - DNA, 15 bp, Homo sapiens
atacttcagattatt

SEQ ID NO: 1901308 - DNA, 15 bp, Homo sapiens
tacttcagattattt

SEQ ID NO: 1901309 - DNA, 15 bp, Homo sapiens
acttcagattatttt

SEQ ID NO: 1901310 - DNA, 15 bp, Homo sapiens
cttcagattattttt

SEQ ID NO: 1901311 - DNA, 15 bp, Homo sapiens
ttcagattattttta

SEQ ID NO: 1901312 - DNA, 15 bp, Homo sapiens
tcagattatttttag

SEQ ID NO: 1901313 - DNA, 15 bp, Homo sapiens
cagattatttttaga

SEQ ID NO: 1901314 - DNA, 15 bp, Homo sapiens
agattatttttagaa

SEQ ID NO: 1901315 - DNA, 15 bp, Homo sapiens
gattatttttagaac

SEQ ID NO: 1901316 - DNA, 15 bp, Homo sapiens
attatttttagaacg

SEQ ID NO: 1901317 - DNA, 15 bp, Homo sapiens
ttatttttagaacgt

SEQ ID NO: 1901318 - DNA, 15 bp, Homo sapiens
tatttttagaacgtg

SEQ ID NO: 1901319 - DNA, 15 bp, Homo sapiens
atttttagaacgtgg

SEQ ID NO: 1901320 - DNA, 15 bp, Homo sapiens
tttttagaacgtggt

SEQ ID NO: 1901321 - DNA, 15 bp, Homo sapiens
ttttagaacgtggta

SEQ ID NO: 1901322 - DNA, 15 bp, Homo sapiens
tttagaacgtggtat

SEQ ID NO: 1901323 - DNA, 15 bp, Homo sapiens
ttagaacgtggtatg

SEQ ID NO: 1901324 - DNA, 15 bp, Homo sapiens
tagaacgtggtatgg

SEQ ID NO: 1901325 - DNA, 15 bp, Homo sapiens
agaacgtggtatggt

SEQ ID NO: 1901326 - DNA, 15 bp, Homo sapiens
gaacgtggtatggtg

SEQ ID NO: 1901327 - DNA, 15 bp, Homo sapiens
aacgtggtatggtga

SEQ ID NO: 1901328 - DNA, 15 bp, Homo sapiens
acgtggtatggtgag

SEQ ID NO: 1901329 - DNA, 15 bp, Homo sapiens
cgtggtatggtgaga

SEQ ID NO: 1901330 - DNA, 15 bp, Homo sapiens
gtggtatggtgagaa

SEQ ID NO: 1901331 - DNA, 15 bp, Homo sapiens
tggtatggtgagaac

SEQ ID NO: 1901332 - DNA, 15 bp, Homo sapiens
ggtatggtgagaaca

SEQ ID NO: 1901333 - DNA, 15 bp, Homo sapiens
gtatggtgagaacaa

SEQ ID NO: 1901334 - DNA, 15 bp, Homo sapiens
tatggtgagaacaaa

SEQ ID NO: 1901335 - DNA, 15 bp, Homo sapiens
atggtgagaacaaat

SEQ ID NO: 1901336 - DNA, 15 bp, Homo sapiens
tggtgagaacaaata

SEQ ID NO: 1901337 - DNA, 15 bp, Homo sapiens
ggtgagaacaaataa

SEQ ID NO: 1901338 - DNA, 15 bp, Homo sapiens
gtgagaacaaataaa

SEQ ID NO: 1901339 - DNA, 15 bp, Homo sapiens
tgagaacaaataaat

SEQ ID NO: 1901340 - DNA, 15 bp, Homo sapiens
gagaacaaataaatt

SEQ ID NO: 1901341 - DNA, 15 bp, Homo sapiens
agaacaaataaattg

SEQ ID NO: 1901342 - DNA, 15 bp, Homo sapiens
gaacaaataaattgg

SEQ ID NO: 1901343 - DNA, 15 bp, Homo sapiens
aacaaataaattggg

SEQ ID NO: 1901344 - DNA, 15 bp, Homo sapiens
acaaataaattgggg

SEQ ID NO: 1901345 - DNA, 15 bp, Homo sapiens
caaataaattggggt

SEQ ID NO: 1901346 - DNA, 15 bp, Homo sapiens
aaataaattggggtt

SEQ ID NO: 1901347 - DNA, 15 bp, Homo sapiens
aataaattggggttt

SEQ ID NO: 1901348 - DNA, 15 bp, Homo sapiens
ataaattggggtttc

SEQ ID NO: 1901349 - DNA, 15 bp, Homo sapiens
taaattggggtttcc

SEQ ID NO: 1901350 - DNA, 15 bp, Homo sapiens
aaattggggtttcca

SEQ ID NO: 1901351 - DNA, 15 bp, Homo sapiens
aattggggtttccaa

SEQ ID NO: 1901352 - DNA, 15 bp, Homo sapiens
attggggtttccaaa

SEQ ID NO: 1901353 - DNA, 15 bp, Homo sapiens
ttggggtttccaaat

SEQ ID NO: 1901354 - DNA, 15 bp, Homo sapiens
tggggtttccaaatc

SEQ ID NO: 1901355 - DNA, 15 bp, Homo sapiens
ggggtttccaaatct

SEQ ID NO: 1901356 - DNA, 15 bp, Homo sapiens
gggtttccaaatctt

SEQ ID NO: 1901357 - DNA, 15 bp, Homo sapiens
ggtttccaaatctta

SEQ ID NO: 1901358 - DNA, 15 bp, Homo sapiens
gtttccaaatcttaa

SEQ ID NO: 1901359 - DNA, 15 bp, Homo sapiens
tttccaaatcttaat

SEQ ID NO: 1901360 - DNA, 15 bp, Homo sapiens
ttccaaatcttaata

SEQ ID NO: 1901361 - DNA, 15 bp, Homo sapiens
tccaaatcttaataa

SEQ ID NO: 1901362 - DNA, 15 bp, Homo sapiens
ccaaatcttaataaa

SEQ ID NO: 1901363 - DNA, 15 bp, Homo sapiens
caaatcttaataaat

SEQ ID NO: 1901364 - DNA, 15 bp, Homo sapiens
aaatcttaataaatt

SEQ ID NO: 1901365 - DNA, 15 bp, Homo sapiens
aatcttaataaatta

SEQ ID NO: 1901366 - DNA, 15 bp, Homo sapiens
atcttaataaattat

SEQ ID NO: 1901367 - DNA, 15 bp, Homo sapiens
tcttaataaattatg

SEQ ID NO: 1901368 - DNA, 15 bp, Homo sapiens
cttaataaattatgt

SEQ ID NO: 1901369 - DNA, 15 bp, Homo sapiens
ttaataaattatgtg

SEQ ID NO: 1901370 - DNA, 15 bp, Homo sapiens
taataaattatgtgg

SEQ ID NO: 1901371 - DNA, 15 bp, Homo sapiens
aataaattatgtggc

SEQ ID NO: 1901372 - DNA, 15 bp, Homo sapiens
ataaattatgtggcc

SEQ ID NO: 1901373 - DNA, 15 bp, Homo sapiens
taaattatgtggccc

SEQ ID NO: 1901374 - DNA, 15 bp, Homo sapiens
aaattatgtggccct

SEQ ID NO: 1901375 - DNA, 15 bp, Homo sapiens
aattatgtggccctc

SEQ ID NO: 1901376 - DNA, 15 bp, Homo sapiens
attatgtggccctca

SEQ ID NO: 1901377 - DNA, 15 bp, Homo sapiens
ttatgtggccctcag

SEQ ID NO: 1901378 - DNA, 15 bp, Homo sapiens
tatgtggccctcagt

SEQ ID NO: 1901379 - DNA, 15 bp, Homo sapiens
atgtggccctcagtg

SEQ ID NO: 1901380 - DNA, 15 bp, Homo sapiens
tgtggccctcagtgg

SEQ ID NO: 1901381 - DNA, 15 bp, Homo sapiens
gtggccctcagtggg

SEQ ID NO: 1901382 - DNA, 15 bp, Homo sapiens
tggccctcagtggga

SEQ ID NO: 1901383 - DNA, 15 bp, Homo sapiens
ggccctcagtgggat

SEQ ID NO: 1901384 - DNA, 15 bp, Homo sapiens
gccctcagtgggatt

SEQ ID NO: 1901385 - DNA, 15 bp, Homo sapiens
ccctcagtgggatta

SEQ ID NO: 1901386 - DNA, 15 bp, Homo sapiens
cctcagtgggattag

SEQ ID NO: 1901387 - DNA, 15 bp, Homo sapiens
ctcagtgggattagc

SEQ ID NO: 1901388 - DNA, 15 bp, Homo sapiens
tcagtgggattagca

SEQ ID NO: 1901389 - DNA, 15 bp, Homo sapiens
cagtgggattagcag

SEQ ID NO: 1901390 - DNA, 15 bp, Homo sapiens
agtgggattagcagg

SEQ ID NO: 1901391 - DNA, 15 bp, Homo sapiens
gtgggattagcaggg

SEQ ID NO: 1901392 - DNA, 15 bp, Homo sapiens
tgggattagcagggt

SEQ ID NO: 1901393 - DNA, 15 bp, Homo sapiens
gggattagcagggtt

SEQ ID NO: 1901394 - DNA, 15 bp, Homo sapiens
ggattagcagggttg

SEQ ID NO: 1901395 - DNA, 15 bp, Homo sapiens
gattagcagggttgt

SEQ ID NO: 1901396 - DNA, 15 bp, Homo sapiens
attagcagggttgta

SEQ ID NO: 1901397 - DNA, 15 bp, Homo sapiens
ttagcagggttgtat

SEQ ID NO: 1901398 - DNA, 15 bp, Homo sapiens
tagcagggttgtatt

SEQ ID NO: 1901399 - DNA, 15 bp, Homo sapiens
agcagggttgtattg

SEQ ID NO: 1901400 - DNA, 15 bp, Homo sapiens
gcagggttgtattga

SEQ ID NO: 1901401 - DNA, 15 bp, Homo sapiens
cagggttgtattgaa

SEQ ID NO: 1901402 - DNA, 15 bp, Homo sapiens
agggttgtattgaaa

SEQ ID NO: 1901403 - DNA, 15 bp, Homo sapiens
gggttgtattgaaaa

SEQ ID NO: 1901404 - DNA, 15 bp, Homo sapiens
ggttgtattgaaaac

SEQ ID NO: 1901405 - DNA, 15 bp, Homo sapiens
gttgtattgaaaaca

SEQ ID NO: 1901406 - DNA, 15 bp, Homo sapiens
ttgtattgaaaacac

SEQ ID NO: 1901407 - DNA, 15 bp, Homo sapiens
tgtattgaaaacacc

SEQ ID NO: 1901408 - DNA, 15 bp, Homo sapiens
gtattgaaaacacca

SEQ ID NO: 1901409 - DNA, 15 bp, Homo sapiens
tattgaaaacaccaa

SEQ ID NO: 1901410 - DNA, 15 bp, Homo sapiens
attgaaaacaccaat

SEQ ID NO: 1901411 - DNA, 15 bp, Homo sapiens
ttgaaaacaccaata

SEQ ID NO: 1901412 - DNA, 15 bp, Homo sapiens
tgaaaacaccaatag

SEQ ID NO: 1901413 - DNA, 15 bp, Homo sapiens
gaaaacaccaataga

SEQ ID NO: 1901414 - DNA, 15 bp, Homo sapiens
aaaacaccaatagaa

SEQ ID NO: 1901415 - DNA, 15 bp, Homo sapiens
aaacaccaatagaaa

SEQ ID NO: 1901416 - DNA, 15 bp, Homo sapiens
aacaccaatagaaac

SEQ ID NO: 1901417 - DNA, 15 bp, Homo sapiens
acaccaatagaaaca

SEQ ID NO: 1901418 - DNA, 15 bp, Homo sapiens
caccaatagaaacaa

SEQ ID NO: 1901419 - DNA, 15 bp, Homo sapiens
accaatagaaacaaa

SEQ ID NO: 1901420 - DNA, 15 bp, Homo sapiens
ccaatagaaacaaaa

SEQ ID NO: 1901421 - DNA, 15 bp, Homo sapiens
caatagaaacaaaat

SEQ ID NO: 1901422 - DNA, 15 bp, Homo sapiens
aatagaaacaaaata

SEQ ID NO: 1901423 - DNA, 15 bp, Homo sapiens
atagaaacaaaatag

SEQ ID NO: 1901424 - DNA, 15 bp, Homo sapiens
tagaaacaaaatagt

SEQ ID NO: 1901425 - DNA, 15 bp, Homo sapiens
agaaacaaaatagtt

SEQ ID NO: 1901426 - DNA, 15 bp, Homo sapiens
gaaacaaaatagttc

SEQ ID NO: 1901427 - DNA, 15 bp, Homo sapiens
aaacaaaatagttct

SEQ ID NO: 1901428 - DNA, 15 bp, Homo sapiens
aacaaaatagttctt

SEQ ID NO: 1901429 - DNA, 15 bp, Homo sapiens
acaaaatagttcttt

SEQ ID NO: 1901430 - DNA, 15 bp, Homo sapiens
caaaatagttctttt

SEQ ID NO: 1901431 - DNA, 15 bp, Homo sapiens
aaaatagttctttta

SEQ ID NO: 1901432 - DNA, 15 bp, Homo sapiens
aaatagttcttttat

SEQ ID NO: 1901433 - DNA, 15 bp, Homo sapiens
aatagttcttttatg

SEQ ID NO: 1901434 - DNA, 15 bp, Homo sapiens
atagttcttttatgc

SEQ ID NO: 1901435 - DNA, 15 bp, Homo sapiens
tagttcttttatgcg

SEQ ID NO: 1901436 - DNA, 15 bp, Homo sapiens
agttcttttatgcgc

SEQ ID NO: 1901437 - DNA, 15 bp, Homo sapiens
gttcttttatgcgct

SEQ ID NO: 1901438 - DNA, 15 bp, Homo sapiens
ttcttttatgcgctt

SEQ ID NO: 1901439 - DNA, 15 bp, Homo sapiens
tcttttatgcgcttt

SEQ ID NO: 1901440 - DNA, 15 bp, Homo sapiens
cttttatgcgcttta

SEQ ID NO: 1901441 - DNA, 15 bp, Homo sapiens
ttttatgcgctttaa

SEQ ID NO: 1901442 - DNA, 15 bp, Homo sapiens
tttatgcgctttaaa

SEQ ID NO: 1901443 - DNA, 15 bp, Homo sapiens
ttatgcgctttaaat

SEQ ID NO: 1901444 - DNA, 15 bp, Homo sapiens
tatgcgctttaaata

SEQ ID NO: 1901445 - DNA, 15 bp, Homo sapiens
atgcgctttaaataa

SEQ ID NO: 1901446 - DNA, 15 bp, Homo sapiens
tgcgctttaaataaa

SEQ ID NO: 1901447 - DNA, 15 bp, Homo sapiens
gcgctttaaataaaa

SEQ ID NO: 1901448 - DNA, 15 bp, Homo sapiens
cgctttaaataaaaa

SEQ ID NO: 1901449 - DNA, 15 bp, Homo sapiens
gctttaaataaaaat

SEQ ID NO: 1901450 - DNA, 15 bp, Homo sapiens
ctttaaataaaaatt

SEQ ID NO: 1901451 - DNA, 15 bp, Homo sapiens
tttaaataaaaattt

SEQ ID NO: 1901452 - DNA, 15 bp, Homo sapiens
ttaaataaaaatttc

SEQ ID NO: 1901453 - DNA, 15 bp, Homo sapiens
taaataaaaatttct

SEQ ID NO: 1901454 - DNA, 15 bp, Homo sapiens
aaataaaaatttctt

SEQ ID NO: 1901455 - DNA, 15 bp, Homo sapiens
aataaaaatttcttt

SEQ ID NO: 1901456 - DNA, 15 bp, Homo sapiens
ataaaaatttctttt

SEQ ID NO: 1901457 - DNA, 15 bp, Homo sapiens
taaaaatttcttttc

SEQ ID NO: 1901458 - DNA, 15 bp, Homo sapiens
aaaaatttcttttca

SEQ ID NO: 1901459 - DNA, 15 bp, Homo sapiens
aaaatttcttttcag

SEQ ID NO: 1901460 - DNA, 15 bp, Homo sapiens
aaatttcttttcagg

SEQ ID NO: 1901461 - DNA, 15 bp, Homo sapiens
aatttcttttcaggc

SEQ ID NO: 1901462 - DNA, 15 bp, Homo sapiens
atttcttttcaggcc

SEQ ID NO: 1901463 - DNA, 15 bp, Homo sapiens
tttcttttcaggcca

SEQ ID NO: 1901464 - DNA, 15 bp, Homo sapiens
ttcttttcaggccag

SEQ ID NO: 1901465 - DNA, 15 bp, Homo sapiens
tcttttcaggccagg

SEQ ID NO: 1901466 - DNA, 15 bp, Homo sapiens
cttttcaggccaggc

SEQ ID NO: 1901467 - DNA, 15 bp, Homo sapiens
ttttcaggccaggcg

SEQ ID NO: 1901468 - DNA, 15 bp, Homo sapiens
tttcaggccaggcgc

SEQ ID NO: 1901469 - DNA, 15 bp, Homo sapiens
ttcaggccaggcgca

SEQ ID NO: 1901470 - DNA, 15 bp, Homo sapiens
tcaggccaggcgcag

SEQ ID NO: 1901471 - DNA, 15 bp, Homo sapiens
caggccaggcgcagt

SEQ ID NO: 1901472 - DNA, 15 bp, Homo sapiens
tgtaatcccagcacc

SEQ ID NO: 1901473 - DNA, 15 bp, Homo sapiens
gtaatcccagcaccc

SEQ ID NO: 1901474 - DNA, 15 bp, Homo sapiens
taatcccagcaccct

SEQ ID NO: 1901475 - DNA, 15 bp, Homo sapiens
aatcccagcaccctg

SEQ ID NO: 1901476 - DNA, 15 bp, Homo sapiens
atcccagcaccctgg

SEQ ID NO: 1901477 - DNA, 15 bp, Homo sapiens
tcccagcaccctggg

SEQ ID NO: 1901478 - DNA, 15 bp, Homo sapiens
cccagcaccctggga

SEQ ID NO: 1901479 - DNA, 15 bp, Homo sapiens
ccagcaccctgggag

SEQ ID NO: 1901480 - DNA, 15 bp, Homo sapiens
cagcaccctgggagg

SEQ ID NO: 1901481 - DNA, 15 bp, Homo sapiens
agcaccctgggaggc

SEQ ID NO: 1901482 - DNA, 15 bp, Homo sapiens
gcaccctgggaggct

SEQ ID NO: 1901483 - DNA, 15 bp, Homo sapiens
caccctgggaggctg

SEQ ID NO: 1901484 - DNA, 15 bp, Homo sapiens
accctgggaggctga

SEQ ID NO: 1901485 - DNA, 15 bp, Homo sapiens
ccctgggaggctgag

SEQ ID NO: 1901486 - DNA, 15 bp, Homo sapiens
tgaggcaggcagatc

SEQ ID NO: 1901487 - DNA, 15 bp, Homo sapiens
caggcagatcacctc

SEQ ID NO: 1901488 - DNA, 15 bp, Homo sapiens
aggcagatcacctca

SEQ ID NO: 1901489 - DNA, 15 bp, Homo sapiens
ggcagatcacctcag

SEQ ID NO: 1901490 - DNA, 15 bp, Homo sapiens
gcagatcacctcagg

SEQ ID NO: 1901491 - DNA, 15 bp, Homo sapiens
cagatcacctcaggt

SEQ ID NO: 1901492 - DNA, 15 bp, Homo sapiens
agatcacctcaggtc

SEQ ID NO: 1901493 - DNA, 15 bp, Homo sapiens
gatcacctcaggtca

SEQ ID NO: 1901494 - DNA, 15 bp, Homo sapiens
atcacctcaggtcag

SEQ ID NO: 1901495 - DNA, 15 bp, Homo sapiens
tcacctcaggtcagg

SEQ ID NO: 1901496 - DNA, 15 bp, Homo sapiens
cacctcaggtcagga

SEQ ID NO: 1901497 - DNA, 15 bp, Homo sapiens
acctcaggtcaggag

SEQ ID NO: 1901498 - DNA, 15 bp, Homo sapiens
cctcaggtcaggagt

SEQ ID NO: 1901499 - DNA, 15 bp, Homo sapiens
ctcaggtcaggagtt

SEQ ID NO: 1901500 - DNA, 15 bp, Homo sapiens
tcaggtcaggagttt

SEQ ID NO: 1901501 - DNA, 15 bp, Homo sapiens
caggtcaggagttta

SEQ ID NO: 1901502 - DNA, 15 bp, Homo sapiens
caggagtttaagaca

SEQ ID NO: 1901503 - DNA, 15 bp, Homo sapiens
aggagtttaagacaa

SEQ ID NO: 1901504 - DNA, 15 bp, Homo sapiens
taagacaagcctggc

SEQ ID NO: 1901505 - DNA, 15 bp, Homo sapiens
aagacaagcctggcc

SEQ ID NO: 1901506 - DNA, 15 bp, Homo sapiens
agacaagcctggcca

SEQ ID NO: 1901507 - DNA, 15 bp, Homo sapiens
gacaagcctggccaa

SEQ ID NO: 1901508 - DNA, 15 bp, Homo sapiens
acaagcctggccaac

SEQ ID NO: 1901509 - DNA, 15 bp, Homo sapiens
caagcctggccaaca

SEQ ID NO: 1901510 - DNA, 15 bp, Homo sapiens
aagcctggccaacat

SEQ ID NO: 1901511 - DNA, 15 bp, Homo sapiens
caacatggtgaagcg

SEQ ID NO: 1901512 - DNA, 15 bp, Homo sapiens
aacatggtgaagcgc

SEQ ID NO: 1901513 - DNA, 15 bp, Homo sapiens
acatggtgaagcgcc

SEQ ID NO: 1901514 - DNA, 15 bp, Homo sapiens
catggtgaagcgccg

SEQ ID NO: 1901515 - DNA, 15 bp, Homo sapiens
atggtgaagcgccgt

SEQ ID NO: 1901516 - DNA, 15 bp, Homo sapiens
tggtgaagcgccgtc

SEQ ID NO: 1901517 - DNA, 15 bp, Homo sapiens
ggtgaagcgccgtct

SEQ ID NO: 1901518 - DNA, 15 bp, Homo sapiens
gtgaagcgccgtctc

SEQ ID NO: 1901519 - DNA, 15 bp, Homo sapiens
tgaagcgccgtctct

SEQ ID NO: 1901520 - DNA, 15 bp, Homo sapiens
gaagcgccgtctcta

SEQ ID NO: 1901521 - DNA, 15 bp, Homo sapiens
aagcgccgtctctac

SEQ ID NO: 1901522 - DNA, 15 bp, Homo sapiens
agcgccgtctctact

SEQ ID NO: 1901523 - DNA, 15 bp, Homo sapiens
gcgccgtctctacta

SEQ ID NO: 1901524 - DNA, 15 bp, Homo sapiens
cgccgtctctactaa

SEQ ID NO: 1901525 - DNA, 15 bp, Homo sapiens
gccgtctctactaaa

SEQ ID NO: 1901526 - DNA, 15 bp, Homo sapiens
aaaattagccgggta

SEQ ID NO: 1901527 - DNA, 15 bp, Homo sapiens
aaattagccgggtat

SEQ ID NO: 1901528 - DNA, 15 bp, Homo sapiens
aattagccgggtatg

SEQ ID NO: 1901529 - DNA, 15 bp, Homo sapiens
attagccgggtatga

SEQ ID NO: 1901530 - DNA, 15 bp, Homo sapiens
ttagccgggtatgat

SEQ ID NO: 1901531 - DNA, 15 bp, Homo sapiens
tagccgggtatgatg

SEQ ID NO: 1901532 - DNA, 15 bp, Homo sapiens
agccgggtatgatgg

SEQ ID NO: 1901533 - DNA, 15 bp, Homo sapiens
gccgggtatgatggc

SEQ ID NO: 1901534 - DNA, 15 bp, Homo sapiens
ccgggtatgatggcg

SEQ ID NO: 1901535 - DNA, 15 bp, Homo sapiens
cgggtatgatggcgc

SEQ ID NO: 1901536 - DNA, 15 bp, Homo sapiens
gggtatgatggcgca

SEQ ID NO: 1901537 - DNA, 15 bp, Homo sapiens
ggtatgatggcgcat

SEQ ID NO: 1901538 - DNA, 15 bp, Homo sapiens
gtatgatggcgcatg

SEQ ID NO: 1901539 - DNA, 15 bp, Homo sapiens
tatgatggcgcatgc

SEQ ID NO: 1901540 - DNA, 15 bp, Homo sapiens
atgatggcgcatgcc

SEQ ID NO: 1901541 - DNA, 15 bp, Homo sapiens
aatcccagctactcc

SEQ ID NO: 1901542 - DNA, 15 bp, Homo sapiens
atcccagctactcca

SEQ ID NO: 1901543 - DNA, 15 bp, Homo sapiens
tcccagctactccag

SEQ ID NO: 1901544 - DNA, 15 bp, Homo sapiens
cccagctactccaga

SEQ ID NO: 1901545 - DNA, 15 bp, Homo sapiens
ccagctactccagag

SEQ ID NO: 1901546 - DNA, 15 bp, Homo sapiens
cagctactccagagg

SEQ ID NO: 1901547 - DNA, 15 bp, Homo sapiens
agctactccagaggc

SEQ ID NO: 1901548 - DNA, 15 bp, Homo sapiens
gctactccagaggct

SEQ ID NO: 1901549 - DNA, 15 bp, Homo sapiens
ctactccagaggctg

SEQ ID NO: 1901550 - DNA, 15 bp, Homo sapiens
tactccagaggctga

SEQ ID NO: 1901551 - DNA, 15 bp, Homo sapiens
actccagaggctgag

SEQ ID NO: 1901552 - DNA, 15 bp, Homo sapiens
ctccagaggctgagg

SEQ ID NO: 1901553 - DNA, 15 bp, Homo sapiens
tccagaggctgaggc

SEQ ID NO: 1901554 - DNA, 15 bp, Homo sapiens
ccagaggctgaggca

SEQ ID NO: 1901555 - DNA, 15 bp, Homo sapiens
cagaggctgaggcat

SEQ ID NO: 1901556 - DNA, 15 bp, Homo sapiens
agaggctgaggcatg

SEQ ID NO: 1901557 - DNA, 15 bp, Homo sapiens
gaggctgaggcatga

SEQ ID NO: 1901558 - DNA, 15 bp, Homo sapiens
aggctgaggcatgag

SEQ ID NO: 1901559 - DNA, 15 bp, Homo sapiens
ggctgaggcatgaga

SEQ ID NO: 1901560 - DNA, 15 bp, Homo sapiens
gctgaggcatgagaa

SEQ ID NO: 1901561 - DNA, 15 bp, Homo sapiens
ctgaggcatgagaat

SEQ ID NO: 1901562 - DNA, 15 bp, Homo sapiens
gaatcacttgaactc

SEQ ID NO: 1901563 - DNA, 15 bp, Homo sapiens
aatcacttgaactca

SEQ ID NO: 1901564 - DNA, 15 bp, Homo sapiens
atcacttgaactcag

SEQ ID NO: 1901565 - DNA, 15 bp, Homo sapiens
tcacttgaactcagg

SEQ ID NO: 1901566 - DNA, 15 bp, Homo sapiens
cacttgaactcagga

SEQ ID NO: 1901567 - DNA, 15 bp, Homo sapiens
acttgaactcaggag

SEQ ID NO: 1901568 - DNA, 15 bp, Homo sapiens
cttgaactcaggaga

SEQ ID NO: 1901569 - DNA, 15 bp, Homo sapiens
ttgaactcaggagat

SEQ ID NO: 1901570 - DNA, 15 bp, Homo sapiens
tgaactcaggagatg

SEQ ID NO: 1901571 - DNA, 15 bp, Homo sapiens
gaactcaggagatgg

SEQ ID NO: 1901572 - DNA, 15 bp, Homo sapiens
aactcaggagatgga

SEQ ID NO: 1901573 - DNA, 15 bp, Homo sapiens
actcaggagatggag

SEQ ID NO: 1901574 - DNA, 15 bp, Homo sapiens
ctcaggagatggagg

SEQ ID NO: 1901575 - DNA, 15 bp, Homo sapiens
tcaggagatggaggt

SEQ ID NO: 1901576 - DNA, 15 bp, Homo sapiens
caggagatggaggtt

SEQ ID NO: 1901577 - DNA, 15 bp, Homo sapiens
aggagatggaggttg

SEQ ID NO: 1901578 - DNA, 15 bp, Homo sapiens
atggaggttgcagtg

SEQ ID NO: 1901579 - DNA, 15 bp, Homo sapiens
gtgagctgagatggt

SEQ ID NO: 1901580 - DNA, 15 bp, Homo sapiens
tgagctgagatggtg

SEQ ID NO: 1901581 - DNA, 15 bp, Homo sapiens
gagctgagatggtgc

SEQ ID NO: 1901582 - DNA, 15 bp, Homo sapiens
agctgagatggtgcc

SEQ ID NO: 1901583 - DNA, 15 bp, Homo sapiens
gctgagatggtgcca

SEQ ID NO: 1901584 - DNA, 15 bp, Homo sapiens
ctgagatggtgccac

SEQ ID NO: 1901585 - DNA, 15 bp, Homo sapiens
tgagatggtgccact

SEQ ID NO: 1901586 - DNA, 15 bp, Homo sapiens
gcaacagagtgagat

SEQ ID NO: 1901587 - DNA, 15 bp, Homo sapiens
caacagagtgagatt

SEQ ID NO: 1901588 - DNA, 15 bp, Homo sapiens
aacagagtgagattc

SEQ ID NO: 1901589 - DNA, 15 bp, Homo sapiens
acagagtgagattct

SEQ ID NO: 1901590 - DNA, 15 bp, Homo sapiens
cagagtgagattctg

SEQ ID NO: 1901591 - DNA, 15 bp, Homo sapiens
agagtgagattctgt

SEQ ID NO: 1901592 - DNA, 15 bp, Homo sapiens
gagtgagattctgtc

SEQ ID NO: 1901593 - DNA, 15 bp, Homo sapiens
agtgagattctgtct

SEQ ID NO: 1901594 - DNA, 15 bp, Homo sapiens
gtgagattctgtctc

SEQ ID NO: 1901595 - DNA, 15 bp, Homo sapiens
tgagattctgtctca

SEQ ID NO: 1901596 - DNA, 15 bp, Homo sapiens
gattctgtctcaaac

SEQ ID NO: 1901597 - DNA, 15 bp, Homo sapiens
attctgtctcaaaca

SEQ ID NO: 1901598 - DNA, 15 bp, Homo sapiens
ttctgtctcaaacaa

SEQ ID NO: 1901599 - DNA, 15 bp, Homo sapiens
tctgtctcaaacaac

SEQ ID NO: 1901600 - DNA, 15 bp, Homo sapiens
ctgtctcaaacaaca

SEQ ID NO: 1901601 - DNA, 15 bp, Homo sapiens
tgtctcaaacaacaa

SEQ ID NO: 1901602 - DNA, 15 bp, Homo sapiens
gtctcaaacaacaac

SEQ ID NO: 1901603 - DNA, 15 bp, Homo sapiens
tctcaaacaacaaca

SEQ ID NO: 1901604 - DNA, 15 bp, Homo sapiens
ctcaaacaacaacaa

SEQ ID NO: 1901605 - DNA, 15 bp, Homo sapiens
tcaaacaacaacaac

SEQ ID NO: 1901606 - DNA, 15 bp, Homo sapiens
caacaacaacaataa

SEQ ID NO: 1901607 - DNA, 15 bp, Homo sapiens
aacaacaacaataac

SEQ ID NO: 1901608 - DNA, 15 bp, Homo sapiens
acaacaacaataaca

SEQ ID NO: 1901609 - DNA, 15 bp, Homo sapiens
caacaacaataacaa

SEQ ID NO: 1901610 - DNA, 15 bp, Homo sapiens
aacaacaataacaaa

SEQ ID NO: 1901611 - DNA, 15 bp, Homo sapiens
acaacaataacaaaa

SEQ ID NO: 1901612 - DNA, 15 bp, Homo sapiens
caacaataacaaaac

SEQ ID NO: 1901613 - DNA, 15 bp, Homo sapiens
aacaataacaaaaca

SEQ ID NO: 1901614 - DNA, 15 bp, Homo sapiens
acaataacaaaacat

SEQ ID NO: 1901615 - DNA, 15 bp, Homo sapiens
caataacaaaacatc

SEQ ID NO: 1901616 - DNA, 15 bp, Homo sapiens
aataacaaaacatct

SEQ ID NO: 1901617 - DNA, 15 bp, Homo sapiens
ataacaaaacatctc

SEQ ID NO: 1901618 - DNA, 15 bp, Homo sapiens
taacaaaacatctct

SEQ ID NO: 1901619 - DNA, 15 bp, Homo sapiens
aacaaaacatctctt

SEQ ID NO: 1901620 - DNA, 15 bp, Homo sapiens
acaaaacatctcttt

SEQ ID NO: 1901621 - DNA, 15 bp, Homo sapiens
caaaacatctctttt

SEQ ID NO: 1901622 - DNA, 15 bp, Homo sapiens
aaaacatctcttttc

SEQ ID NO: 1901623 - DNA, 15 bp, Homo sapiens
aaacatctcttttca

SEQ ID NO: 1901624 - DNA, 15 bp, Homo sapiens
aacatctcttttcag

SEQ ID NO: 1901625 - DNA, 15 bp, Homo sapiens
acatctcttttcagg

SEQ ID NO: 1901626 - DNA, 15 bp, Homo sapiens
catctcttttcaggc

SEQ ID NO: 1901627 - DNA, 15 bp, Homo sapiens
atctcttttcaggcc

SEQ ID NO: 1901628 - DNA, 15 bp, Homo sapiens
tctcttttcaggcca

SEQ ID NO: 1901629 - DNA, 15 bp, Homo sapiens
ctcttttcaggccag

SEQ ID NO: 1901630 - DNA, 15 bp, Homo sapiens
cttttcaggccaggt

SEQ ID NO: 1901631 - DNA, 15 bp, Homo sapiens
ttttcaggccaggta

SEQ ID NO: 1901632 - DNA, 15 bp, Homo sapiens
tttcaggccaggtac

SEQ ID NO: 1901633 - DNA, 15 bp, Homo sapiens
ttcaggccaggtact

SEQ ID NO: 1901634 - DNA, 15 bp, Homo sapiens
tcaggccaggtactg

SEQ ID NO: 1901635 - DNA, 15 bp, Homo sapiens
caggccaggtactgt

SEQ ID NO: 1901636 - DNA, 15 bp, Homo sapiens
aggccaggtactgtg

SEQ ID NO: 1901637 - DNA, 15 bp, Homo sapiens
ggccaggtactgtgg

SEQ ID NO: 1901638 - DNA, 15 bp, Homo sapiens
gccaggtactgtggc

SEQ ID NO: 1901639 - DNA, 15 bp, Homo sapiens
ccaggtactgtggct

SEQ ID NO: 1901640 - DNA, 15 bp, Homo sapiens
caggtactgtggctc

SEQ ID NO: 1901641 - DNA, 15 bp, Homo sapiens
aggtactgtggctca

SEQ ID NO: 1901642 - DNA, 15 bp, Homo sapiens
ggtactgtggctcac

SEQ ID NO: 1901643 - DNA, 15 bp, Homo sapiens
gtactgtggctcacg

SEQ ID NO: 1901644 - DNA, 15 bp, Homo sapiens
tactgtggctcacgc

SEQ ID NO: 1901645 - DNA, 15 bp, Homo sapiens
actgtggctcacgcc

SEQ ID NO: 1901646 - DNA, 15 bp, Homo sapiens
ctgtggctcacgcct

SEQ ID NO: 1901647 - DNA, 15 bp, Homo sapiens
tgtggctcacgcctg

SEQ ID NO: 1901648 - DNA, 15 bp, Homo sapiens
tttgggaggccaaaa

SEQ ID NO: 1901649 - DNA, 15 bp, Homo sapiens
ttgggaggccaaaac

SEQ ID NO: 1901650 - DNA, 15 bp, Homo sapiens
tgggaggccaaaaca

SEQ ID NO: 1901651 - DNA, 15 bp, Homo sapiens
gggaggccaaaacag

SEQ ID NO: 1901652 - DNA, 15 bp, Homo sapiens
ggaggccaaaacagg

SEQ ID NO: 1901653 - DNA, 15 bp, Homo sapiens
gaggccaaaacagga

SEQ ID NO: 1901654 - DNA, 15 bp, Homo sapiens
aggccaaaacaggag

SEQ ID NO: 1901655 - DNA, 15 bp, Homo sapiens
ggccaaaacaggagg

SEQ ID NO: 1901656 - DNA, 15 bp, Homo sapiens
gccaaaacaggaggg

SEQ ID NO: 1901657 - DNA, 15 bp, Homo sapiens
ccaaaacaggagggt

SEQ ID NO: 1901658 - DNA, 15 bp, Homo sapiens
caaaacaggagggtc

SEQ ID NO: 1901659 - DNA, 15 bp, Homo sapiens
aaaacaggagggtcg

SEQ ID NO: 1901660 - DNA, 15 bp, Homo sapiens
aaacaggagggtcgc

SEQ ID NO: 1901661 - DNA, 15 bp, Homo sapiens
aacaggagggtcgct

SEQ ID NO: 1901662 - DNA, 15 bp, Homo sapiens
acaggagggtcgctt

SEQ ID NO: 1901663 - DNA, 15 bp, Homo sapiens
caggagggtcgcttg

SEQ ID NO: 1901664 - DNA, 15 bp, Homo sapiens
aggagggtcgcttga

SEQ ID NO: 1901665 - DNA, 15 bp, Homo sapiens
ggagggtcgcttgag

SEQ ID NO: 1901666 - DNA, 15 bp, Homo sapiens
gagggtcgcttgaga

SEQ ID NO: 1901667 - DNA, 15 bp, Homo sapiens
agggtcgcttgagac

SEQ ID NO: 1901668 - DNA, 15 bp, Homo sapiens
gggtcgcttgagacc

SEQ ID NO: 1901669 - DNA, 15 bp, Homo sapiens
ggtcgcttgagacca

SEQ ID NO: 1901670 - DNA, 15 bp, Homo sapiens
gtcgcttgagaccag

SEQ ID NO: 1901671 - DNA, 15 bp, Homo sapiens
tcgcttgagaccagg

SEQ ID NO: 1901672 - DNA, 15 bp, Homo sapiens
cgcttgagaccagga

SEQ ID NO: 1901673 - DNA, 15 bp, Homo sapiens
tgagaccaggagttt

SEQ ID NO: 1901674 - DNA, 15 bp, Homo sapiens
gagaccaggagtttg

SEQ ID NO: 1901675 - DNA, 15 bp, Homo sapiens
agaccaggagtttga

SEQ ID NO: 1901676 - DNA, 15 bp, Homo sapiens
gaccaggagtttgag

SEQ ID NO: 1901677 - DNA, 15 bp, Homo sapiens
accaggagtttgaga

SEQ ID NO: 1901678 - DNA, 15 bp, Homo sapiens
gaccagcttgggcag

SEQ ID NO: 1901679 - DNA, 15 bp, Homo sapiens
accagcttgggcagc

SEQ ID NO: 1901680 - DNA, 15 bp, Homo sapiens
ccagcttgggcagct

SEQ ID NO: 1901681 - DNA, 15 bp, Homo sapiens
cagcttgggcagctg

SEQ ID NO: 1901682 - DNA, 15 bp, Homo sapiens
agcttgggcagctgg

SEQ ID NO: 1901683 - DNA, 15 bp, Homo sapiens
gcttgggcagctggt

SEQ ID NO: 1901684 - DNA, 15 bp, Homo sapiens
cttgggcagctggtc

SEQ ID NO: 1901685 - DNA, 15 bp, Homo sapiens
ttgggcagctggtct

SEQ ID NO: 1901686 - DNA, 15 bp, Homo sapiens
tgggcagctggtctc

SEQ ID NO: 1901687 - DNA, 15 bp, Homo sapiens
gggcagctggtctct

SEQ ID NO: 1901688 - DNA, 15 bp, Homo sapiens
ggcagctggtctcta

SEQ ID NO: 1901689 - DNA, 15 bp, Homo sapiens
gcagctggtctctat

SEQ ID NO: 1901690 - DNA, 15 bp, Homo sapiens
cagctggtctctatt

SEQ ID NO: 1901691 - DNA, 15 bp, Homo sapiens
agctggtctctattt

SEQ ID NO: 1901692 - DNA, 15 bp, Homo sapiens
gctggtctctatttg

SEQ ID NO: 1901693 - DNA, 15 bp, Homo sapiens
ctggtctctatttga

SEQ ID NO: 1901694 - DNA, 15 bp, Homo sapiens
tggtctctatttgaa

SEQ ID NO: 1901695 - DNA, 15 bp, Homo sapiens
ggtctctatttgaac

SEQ ID NO: 1901696 - DNA, 15 bp, Homo sapiens
gtctctatttgaaca

SEQ ID NO: 1901697 - DNA, 15 bp, Homo sapiens
tctctatttgaacaa

SEQ ID NO: 1901698 - DNA, 15 bp, Homo sapiens
ctctatttgaacaaa

SEQ ID NO: 1901699 - DNA, 15 bp, Homo sapiens
tctatttgaacaaac

SEQ ID NO: 1901700 - DNA, 15 bp, Homo sapiens
ctatttgaacaaaca

SEQ ID NO: 1901701 - DNA, 15 bp, Homo sapiens
tatttgaacaaacaa

SEQ ID NO: 1901702 - DNA, 15 bp, Homo sapiens
atttgaacaaacaaa

SEQ ID NO: 1901703 - DNA, 15 bp, Homo sapiens
tttgaacaaacaaac

SEQ ID NO: 1901704 - DNA, 15 bp, Homo sapiens
ttgaacaaacaaaca

SEQ ID NO: 1901705 - DNA, 15 bp, Homo sapiens
tgaacaaacaaacaa

SEQ ID NO: 1901706 - DNA, 15 bp, Homo sapiens
caaacaaacaaacac

SEQ ID NO: 1901707 - DNA, 15 bp, Homo sapiens
aaacaaacaaacaca

SEQ ID NO: 1901708 - DNA, 15 bp, Homo sapiens
aacaaacaaacacaa

SEQ ID NO: 1901709 - DNA, 15 bp, Homo sapiens
acaaacaaacacaat

SEQ ID NO: 1901710 - DNA, 15 bp, Homo sapiens
caaacaaacacaata

SEQ ID NO: 1901711 - DNA, 15 bp, Homo sapiens
aaacaaacacaatac

SEQ ID NO: 1901712 - DNA, 15 bp, Homo sapiens
aacaaacacaatact

SEQ ID NO: 1901713 - DNA, 15 bp, Homo sapiens
acaaacacaatactc

SEQ ID NO: 1901714 - DNA, 15 bp, Homo sapiens
caaacacaatactct

SEQ ID NO: 1901715 - DNA, 15 bp, Homo sapiens
aaacacaatactctt

SEQ ID NO: 1901716 - DNA, 15 bp, Homo sapiens
aacacaatactcttt

SEQ ID NO: 1901717 - DNA, 15 bp, Homo sapiens
acacaatactctttt

SEQ ID NO: 1901718 - DNA, 15 bp, Homo sapiens
cacaatactcttttc

SEQ ID NO: 1901719 - DNA, 15 bp, Homo sapiens
acaatactcttttca

SEQ ID NO: 1901720 - DNA, 15 bp, Homo sapiens
caatactcttttcat

SEQ ID NO: 1901721 - DNA, 15 bp, Homo sapiens
aatactcttttcata

SEQ ID NO: 1901722 - DNA, 15 bp, Homo sapiens
atactcttttcatag

SEQ ID NO: 1901723 - DNA, 15 bp, Homo sapiens
tactcttttcataga

SEQ ID NO: 1901724 - DNA, 15 bp, Homo sapiens
actcttttcatagaa

SEQ ID NO: 1901725 - DNA, 15 bp, Homo sapiens
ctcttttcatagaaa

SEQ ID NO: 1901726 - DNA, 15 bp, Homo sapiens
tcttttcatagaaaa

SEQ ID NO: 1901727 - DNA, 15 bp, Homo sapiens
cttttcatagaaaaa

SEQ ID NO: 1901728 - DNA, 15 bp, Homo sapiens
ttttcatagaaaaat

SEQ ID NO: 1901729 - DNA, 15 bp, Homo sapiens
tttcatagaaaaatg

SEQ ID NO: 1901730 - DNA, 15 bp, Homo sapiens
ttcatagaaaaatgt

SEQ ID NO: 1901731 - DNA, 15 bp, Homo sapiens
tcatagaaaaatgtt

SEQ ID NO: 1901732 - DNA, 15 bp, Homo sapiens
catagaaaaatgttt

SEQ ID NO: 1901733 - DNA, 15 bp, Homo sapiens
atagaaaaatgttta

SEQ ID NO: 1901734 - DNA, 15 bp, Homo sapiens
tagaaaaatgtttac

SEQ ID NO: 1901735 - DNA, 15 bp, Homo sapiens
agaaaaatgtttact

SEQ ID NO: 1901736 - DNA, 15 bp, Homo sapiens
gaaaaatgtttacta

SEQ ID NO: 1901737 - DNA, 15 bp, Homo sapiens
aaaaatgtttactac

SEQ ID NO: 1901738 - DNA, 15 bp, Homo sapiens
aaaatgtttactaca

SEQ ID NO: 1901739 - DNA, 15 bp, Homo sapiens
aaatgtttactacac

SEQ ID NO: 1901740 - DNA, 15 bp, Homo sapiens
aatgtttactacaca

SEQ ID NO: 1901741 - DNA, 15 bp, Homo sapiens
atgtttactacacaa

SEQ ID NO: 1901742 - DNA, 15 bp, Homo sapiens
tgtttactacacaat

SEQ ID NO: 1901743 - DNA, 15 bp, Homo sapiens
gtttactacacaata

SEQ ID NO: 1901744 - DNA, 15 bp, Homo sapiens
tttactacacaataa

SEQ ID NO: 1901745 - DNA, 15 bp, Homo sapiens
ttactacacaataaa

SEQ ID NO: 1901746 - DNA, 15 bp, Homo sapiens
tactacacaataaac

SEQ ID NO: 1901747 - DNA, 15 bp, Homo sapiens
actacacaataaact

SEQ ID NO: 1901748 - DNA, 15 bp, Homo sapiens
ctacacaataaactt

SEQ ID NO: 1901749 - DNA, 15 bp, Homo sapiens
tacacaataaacttt

SEQ ID NO: 1901750 - DNA, 15 bp, Homo sapiens
acacaataaacttta

SEQ ID NO: 1901751 - DNA, 15 bp, Homo sapiens
cacaataaactttaa

SEQ ID NO: 1901752 - DNA, 15 bp, Homo sapiens
acaataaactttaaa

SEQ ID NO: 1901753 - DNA, 15 bp, Homo sapiens
caataaactttaaaa

SEQ ID NO: 1901754 - DNA, 15 bp, Homo sapiens
aataaactttaaaag

SEQ ID NO: 1901755 - DNA, 15 bp, Homo sapiens
ataaactttaaaaga

SEQ ID NO: 1901756 - DNA, 15 bp, Homo sapiens
taaactttaaaagaa

SEQ ID NO: 1901757 - DNA, 15 bp, Homo sapiens
aaactttaaaagaat

SEQ ID NO: 1901758 - DNA, 15 bp, Homo sapiens
aactttaaaagaata

SEQ ID NO: 1901759 - DNA, 15 bp, Homo sapiens
actttaaaagaatat

SEQ ID NO: 1901760 - DNA, 15 bp, Homo sapiens
ctttaaaagaatatg

SEQ ID NO: 1901761 - DNA, 15 bp, Homo sapiens
tttaaaagaatatgc

SEQ ID NO: 1901762 - DNA, 15 bp, Homo sapiens
ttaaaagaatatgca

SEQ ID NO: 1901763 - DNA, 15 bp, Homo sapiens
taaaagaatatgcag

SEQ ID NO: 1901764 - DNA, 15 bp, Homo sapiens
aaaagaatatgcagc

SEQ ID NO: 1901765 - DNA, 15 bp, Homo sapiens
aaagaatatgcagct

SEQ ID NO: 1901766 - DNA, 15 bp, Homo sapiens
aagaatatgcagctg

SEQ ID NO: 1901767 - DNA, 15 bp, Homo sapiens
agaatatgcagctgt

SEQ ID NO: 1901768 - DNA, 15 bp, Homo sapiens
gaatatgcagctgta

SEQ ID NO: 1901769 - DNA, 15 bp, Homo sapiens
aatatgcagctgtat

SEQ ID NO: 1901770 - DNA, 15 bp, Homo sapiens
atatgcagctgtatt

SEQ ID NO: 1901771 - DNA, 15 bp, Homo sapiens
tatgcagctgtatta

SEQ ID NO: 1901772 - DNA, 15 bp, Homo sapiens
atgcagctgtattaa

SEQ ID NO: 1901773 - DNA, 15 bp, Homo sapiens
tgcagctgtattaat

SEQ ID NO: 1901774 - DNA, 15 bp, Homo sapiens
gcagctgtattaatg

SEQ ID NO: 1901775 - DNA, 15 bp, Homo sapiens
cagctgtattaatgc

SEQ ID NO: 1901776 - DNA, 15 bp, Homo sapiens
agctgtattaatgct

SEQ ID NO: 1901777 - DNA, 15 bp, Homo sapiens
gctgtattaatgcta

SEQ ID NO: 1901778 - DNA, 15 bp, Homo sapiens
ctgtattaatgctat

SEQ ID NO: 1901779 - DNA, 15 bp, Homo sapiens
tgtattaatgctatg

SEQ ID NO: 1901780 - DNA, 15 bp, Homo sapiens
gtattaatgctatga

SEQ ID NO: 1901781 - DNA, 15 bp, Homo sapiens
tattaatgctatgac

SEQ ID NO: 1901782 - DNA, 15 bp, Homo sapiens
attaatgctatgact

SEQ ID NO: 1901783 - DNA, 15 bp, Homo sapiens
ttaatgctatgactc

SEQ ID NO: 1901784 - DNA, 15 bp, Homo sapiens
taatgctatgactcc

SEQ ID NO: 1901785 - DNA, 15 bp, Homo sapiens
aatgctatgactcca

SEQ ID NO: 1901786 - DNA, 15 bp, Homo sapiens
atgctatgactccaa

SEQ ID NO: 1901787 - DNA, 15 bp, Homo sapiens
tgctatgactccaat

SEQ ID NO: 1901788 - DNA, 15 bp, Homo sapiens
gctatgactccaatg

SEQ ID NO: 1901789 - DNA, 15 bp, Homo sapiens
ctatgactccaatgt

SEQ ID NO: 1901790 - DNA, 15 bp, Homo sapiens
tatgactccaatgta

SEQ ID NO: 1901791 - DNA, 15 bp, Homo sapiens
atgactccaatgtaa

SEQ ID NO: 1901792 - DNA, 15 bp, Homo sapiens
tgactccaatgtaaa

SEQ ID NO: 1901793 - DNA, 15 bp, Homo sapiens
gactccaatgtaaaa

SEQ ID NO: 1901794 - DNA, 15 bp, Homo sapiens
actccaatgtaaaaa

SEQ ID NO: 1901795 - DNA, 15 bp, Homo sapiens
ctccaatgtaaaaaa

SEQ ID NO: 1901796 - DNA, 15 bp, Homo sapiens
tccaatgtaaaaaaa

SEQ ID NO: 1901797 - DNA, 15 bp, Homo sapiens
ccaatgtaaaaaaaa

SEQ ID NO: 1901798 - DNA, 15 bp, Homo sapiens
caatgtaaaaaaaaa

SEQ ID NO: 1901799 - DNA, 15 bp, Homo sapiens
tatacacacacacaa

SEQ ID NO: 1901800 - DNA, 15 bp, Homo sapiens
atacacacacacaaa

SEQ ID NO: 1901801 - DNA, 15 bp, Homo sapiens
tacacacacacaaac

SEQ ID NO: 1901802 - DNA, 15 bp, Homo sapiens
cacacacaaacacat

SEQ ID NO: 1901803 - DNA, 15 bp, Homo sapiens
acacacaaacacatt

SEQ ID NO: 1901804 - DNA, 15 bp, Homo sapiens
cacacaaacacattc

SEQ ID NO: 1901805 - DNA, 15 bp, Homo sapiens
acacaaacacattct

SEQ ID NO: 1901806 - DNA, 15 bp, Homo sapiens
cacaaacacattctg

SEQ ID NO: 1901807 - DNA, 15 bp, Homo sapiens
acaaacacattctga

SEQ ID NO: 1901808 - DNA, 15 bp, Homo sapiens
caaacacattctgaa

SEQ ID NO: 1901809 - DNA, 15 bp, Homo sapiens
aaacacattctgaaa

SEQ ID NO: 1901810 - DNA, 15 bp, Homo sapiens
aacacattctgaaat

SEQ ID NO: 1901811 - DNA, 15 bp, Homo sapiens
acacattctgaaata

SEQ ID NO: 1901812 - DNA, 15 bp, Homo sapiens
cacattctgaaatag

SEQ ID NO: 1901813 - DNA, 15 bp, Homo sapiens
acattctgaaataga

SEQ ID NO: 1901814 - DNA, 15 bp, Homo sapiens
cattctgaaatagat

SEQ ID NO: 1901815 - DNA, 15 bp, Homo sapiens
attctgaaatagatt

SEQ ID NO: 1901816 - DNA, 15 bp, Homo sapiens
ttctgaaatagattt

SEQ ID NO: 1901817 - DNA, 15 bp, Homo sapiens
tctgaaatagattta

SEQ ID NO: 1901818 - DNA, 15 bp, Homo sapiens
ctgaaatagatttaa

SEQ ID NO: 1901819 - DNA, 15 bp, Homo sapiens
tgaaatagatttaaa

SEQ ID NO: 1901820 - DNA, 15 bp, Homo sapiens
gaaatagatttaaag

SEQ ID NO: 1901821 - DNA, 15 bp, Homo sapiens
aaatagatttaaagg

SEQ ID NO: 1901822 - DNA, 15 bp, Homo sapiens
aatagatttaaagga

SEQ ID NO: 1901823 - DNA, 15 bp, Homo sapiens
atagatttaaaggaa

SEQ ID NO: 1901824 - DNA, 15 bp, Homo sapiens
tagatttaaaggaat

SEQ ID NO: 1901825 - DNA, 15 bp, Homo sapiens
agatttaaaggaatt

SEQ ID NO: 1901826 - DNA, 15 bp, Homo sapiens
gatttaaaggaatta

SEQ ID NO: 1901827 - DNA, 15 bp, Homo sapiens
atttaaaggaattac

SEQ ID NO: 1901828 - DNA, 15 bp, Homo sapiens
tttaaaggaattaca

SEQ ID NO: 1901829 - DNA, 15 bp, Homo sapiens
ttaaaggaattacat

SEQ ID NO: 1901830 - DNA, 15 bp, Homo sapiens
taaaggaattacatc

SEQ ID NO: 1901831 - DNA, 15 bp, Homo sapiens
aaaggaattacatca

SEQ ID NO: 1901832 - DNA, 15 bp, Homo sapiens
aaggaattacatcaa

SEQ ID NO: 1901833 - DNA, 15 bp, Homo sapiens
aggaattacatcaac

SEQ ID NO: 1901834 - DNA, 15 bp, Homo sapiens
ggaattacatcaaca

SEQ ID NO: 1901835 - DNA, 15 bp, Homo sapiens
gaattacatcaacat

SEQ ID NO: 1901836 - DNA, 15 bp, Homo sapiens
aattacatcaacatg

SEQ ID NO: 1901837 - DNA, 15 bp, Homo sapiens
attacatcaacatgt

SEQ ID NO: 1901838 - DNA, 15 bp, Homo sapiens
ttacatcaacatgtc

SEQ ID NO: 1901839 - DNA, 15 bp, Homo sapiens
tacatcaacatgtca

SEQ ID NO: 1901840 - DNA, 15 bp, Homo sapiens
acatcaacatgtcaa

SEQ ID NO: 1901841 - DNA, 15 bp, Homo sapiens
catcaacatgtcaat

SEQ ID NO: 1901842 - DNA, 15 bp, Homo sapiens
atcaacatgtcaatt

SEQ ID NO: 1901843 - DNA, 15 bp, Homo sapiens
tcaacatgtcaattt

SEQ ID NO: 1901844 - DNA, 15 bp, Homo sapiens
caacatgtcaatttt

SEQ ID NO: 1901845 - DNA, 15 bp, Homo sapiens
aacatgtcaattttt

SEQ ID NO: 1901846 - DNA, 15 bp, Homo sapiens
acatgtcaattttta

SEQ ID NO: 1901847 - DNA, 15 bp, Homo sapiens
catgtcaatttttat

SEQ ID NO: 1901848 - DNA, 15 bp, Homo sapiens
atgtcaatttttatt

SEQ ID NO: 1901849 - DNA, 15 bp, Homo sapiens
tgtcaatttttattt

SEQ ID NO: 1901850 - DNA, 15 bp, Homo sapiens
gtcaatttttatttt

SEQ ID NO: 1901851 - DNA, 15 bp, Homo sapiens
tcaatttttattttt

SEQ ID NO: 1901852 - DNA, 15 bp, Homo sapiens
caatttttatttttt

SEQ ID NO: 1901853 - DNA, 15 bp, Homo sapiens
aatttttattttttc

SEQ ID NO: 1901854 - DNA, 15 bp, Homo sapiens
atttttattttttcg

SEQ ID NO: 1901855 - DNA, 15 bp, Homo sapiens
tttttattttttcgg

SEQ ID NO: 1901856 - DNA, 15 bp, Homo sapiens
ttttattttttcgga

SEQ ID NO: 1901857 - DNA, 15 bp, Homo sapiens
tttattttttcggag

SEQ ID NO: 1901858 - DNA, 15 bp, Homo sapiens
ttattttttcggaga

SEQ ID NO: 1901859 - DNA, 15 bp, Homo sapiens
tattttttcggagac

SEQ ID NO: 1901860 - DNA, 15 bp, Homo sapiens
attttttcggagaca

SEQ ID NO: 1901861 - DNA, 15 bp, Homo sapiens
ttttttcggagacag

SEQ ID NO: 1901862 - DNA, 15 bp, Homo sapiens
tttttcggagacagg

SEQ ID NO: 1901863 - DNA, 15 bp, Homo sapiens
ttttcggagacaggg

SEQ ID NO: 1901864 - DNA, 15 bp, Homo sapiens
tttcggagacagggt

SEQ ID NO: 1901865 - DNA, 15 bp, Homo sapiens
ttcggagacagggtc

SEQ ID NO: 1901866 - DNA, 15 bp, Homo sapiens
tcggagacagggtct

SEQ ID NO: 1901867 - DNA, 15 bp, Homo sapiens
cggagacagggtctc

SEQ ID NO: 1901868 - DNA, 15 bp, Homo sapiens
ggagacagggtctcg

SEQ ID NO: 1901869 - DNA, 15 bp, Homo sapiens
agacagggtctcgct

SEQ ID NO: 1901870 - DNA, 15 bp, Homo sapiens
gacagggtctcgctg

SEQ ID NO: 1901871 - DNA, 15 bp, Homo sapiens
acagggtctcgctgt

SEQ ID NO: 1901872 - DNA, 15 bp, Homo sapiens
cagggtctcgctgtg

SEQ ID NO: 1901873 - DNA, 15 bp, Homo sapiens
agggtctcgctgtgt

SEQ ID NO: 1901874 - DNA, 15 bp, Homo sapiens
gggtctcgctgtgtc

SEQ ID NO: 1901875 - DNA, 15 bp, Homo sapiens
ggtctcgctgtgtca

SEQ ID NO: 1901876 - DNA, 15 bp, Homo sapiens
cgctgtgtcacccaa

SEQ ID NO: 1901877 - DNA, 15 bp, Homo sapiens
acccaagctggagta

SEQ ID NO: 1901878 - DNA, 15 bp, Homo sapiens
cccaagctggagtac

SEQ ID NO: 1901879 - DNA, 15 bp, Homo sapiens
ccaagctggagtaca

SEQ ID NO: 1901880 - DNA, 15 bp, Homo sapiens
caagctggagtacag

SEQ ID NO: 1901881 - DNA, 15 bp, Homo sapiens
aagctggagtacagt

SEQ ID NO: 1901882 - DNA, 15 bp, Homo sapiens
agctggagtacagtg

SEQ ID NO: 1901883 - DNA, 15 bp, Homo sapiens
gagtacagtggtgca

SEQ ID NO: 1901884 - DNA, 15 bp, Homo sapiens
agtacagtggtgcaa

SEQ ID NO: 1901885 - DNA, 15 bp, Homo sapiens
gtacagtggtgcaat

SEQ ID NO: 1901886 - DNA, 15 bp, Homo sapiens
tacagtggtgcaatc

SEQ ID NO: 1901887 - DNA, 15 bp, Homo sapiens
acagtggtgcaatca

SEQ ID NO: 1901888 - DNA, 15 bp, Homo sapiens
cagtggtgcaatcac

SEQ ID NO: 1901889 - DNA, 15 bp, Homo sapiens
agtggtgcaatcaca

SEQ ID NO: 1901890 - DNA, 15 bp, Homo sapiens
actgcagccttgact

SEQ ID NO: 1901891 - DNA, 15 bp, Homo sapiens
ctgcagccttgactt

SEQ ID NO: 1901892 - DNA, 15 bp, Homo sapiens
tgcagccttgacttc

SEQ ID NO: 1901893 - DNA, 15 bp, Homo sapiens
gcagccttgacttcc

SEQ ID NO: 1901894 - DNA, 15 bp, Homo sapiens
cagccttgacttcct

SEQ ID NO: 1901895 - DNA, 15 bp, Homo sapiens
agccttgacttcctg

SEQ ID NO: 1901896 - DNA, 15 bp, Homo sapiens
gccttgacttcctgg

SEQ ID NO: 1901897 - DNA, 15 bp, Homo sapiens
ccttgacttcctggc

SEQ ID NO: 1901898 - DNA, 15 bp, Homo sapiens
cttgacttcctggcc

SEQ ID NO: 1901899 - DNA, 15 bp, Homo sapiens
ttgacttcctggcct

SEQ ID NO: 1901900 - DNA, 15 bp, Homo sapiens
tgacttcctggcctc

SEQ ID NO: 1901901 - DNA, 15 bp, Homo sapiens
gacttcctggcctca

SEQ ID NO: 1901902 - DNA, 15 bp, Homo sapiens
acttcctggcctcaa

SEQ ID NO: 1901903 - DNA, 15 bp, Homo sapiens
cttcctggcctcaag

SEQ ID NO: 1901904 - DNA, 15 bp, Homo sapiens
caagtgatcctcccc

SEQ ID NO: 1901905 - DNA, 15 bp, Homo sapiens
aagtgatcctccccc

SEQ ID NO: 1901906 - DNA, 15 bp, Homo sapiens
agtgatcctcccccc

SEQ ID NO: 1901907 - DNA, 15 bp, Homo sapiens
gtgatcctcccccct

SEQ ID NO: 1901908 - DNA, 15 bp, Homo sapiens
tgatcctcccccctc

SEQ ID NO: 1901909 - DNA, 15 bp, Homo sapiens
gatcctcccccctca

SEQ ID NO: 1901910 - DNA, 15 bp, Homo sapiens
atcctcccccctcag

SEQ ID NO: 1901911 - DNA, 15 bp, Homo sapiens
tcctcccccctcagc

SEQ ID NO: 1901912 - DNA, 15 bp, Homo sapiens
cctcccccctcagcc

SEQ ID NO: 1901913 - DNA, 15 bp, Homo sapiens
ctcccccctcagcct

SEQ ID NO: 1901914 - DNA, 15 bp, Homo sapiens
tcccccctcagcctc

SEQ ID NO: 1901915 - DNA, 15 bp, Homo sapiens
cccccctcagcctcc

SEQ ID NO: 1901916 - DNA, 15 bp, Homo sapiens
ccccctcagcctccc

SEQ ID NO: 1901917 - DNA, 15 bp, Homo sapiens
cccctcagcctccca

SEQ ID NO: 1901918 - DNA, 15 bp, Homo sapiens
ccctcagcctcccaa

SEQ ID NO: 1901919 - DNA, 15 bp, Homo sapiens
caaagtgctggggtc

SEQ ID NO: 1901920 - DNA, 15 bp, Homo sapiens
aaagtgctggggtca

SEQ ID NO: 1901921 - DNA, 15 bp, Homo sapiens
aagtgctggggtcac

SEQ ID NO: 1901922 - DNA, 15 bp, Homo sapiens
agtgctggggtcaca

SEQ ID NO: 1901923 - DNA, 15 bp, Homo sapiens
gtgctggggtcacag

SEQ ID NO: 1901924 - DNA, 15 bp, Homo sapiens
tgctggggtcacaga

SEQ ID NO: 1901925 - DNA, 15 bp, Homo sapiens
gctggggtcacagac

SEQ ID NO: 1901926 - DNA, 15 bp, Homo sapiens
ctggggtcacagacc

SEQ ID NO: 1901927 - DNA, 15 bp, Homo sapiens
tggggtcacagacca

SEQ ID NO: 1901928 - DNA, 15 bp, Homo sapiens
ggggtcacagaccac

SEQ ID NO: 1901929 - DNA, 15 bp, Homo sapiens
gggtcacagaccacc

SEQ ID NO: 1901930 - DNA, 15 bp, Homo sapiens
ggtcacagaccacca

SEQ ID NO: 1901931 - DNA, 15 bp, Homo sapiens
gtcacagaccaccac

SEQ ID NO: 1901932 - DNA, 15 bp, Homo sapiens
tcacagaccaccaca

SEQ ID NO: 1901933 - DNA, 15 bp, Homo sapiens
cacagaccaccacac

SEQ ID NO: 1901934 - DNA, 15 bp, Homo sapiens
acagaccaccacacc

SEQ ID NO: 1901935 - DNA, 15 bp, Homo sapiens
cagaccaccacacct

SEQ ID NO: 1901936 - DNA, 15 bp, Homo sapiens
agaccaccacacctg

SEQ ID NO: 1901937 - DNA, 15 bp, Homo sapiens
gaccaccacacctgg

SEQ ID NO: 1901938 - DNA, 15 bp, Homo sapiens
accacacctggcaac

SEQ ID NO: 1901939 - DNA, 15 bp, Homo sapiens
ccacacctggcaaca

SEQ ID NO: 1901940 - DNA, 15 bp, Homo sapiens
cacacctggcaacat

SEQ ID NO: 1901941 - DNA, 15 bp, Homo sapiens
acacctggcaacatg

SEQ ID NO: 1901942 - DNA, 15 bp, Homo sapiens
cacctggcaacatgt

SEQ ID NO: 1901943 - DNA, 15 bp, Homo sapiens
acctggcaacatgtc

SEQ ID NO: 1901944 - DNA, 15 bp, Homo sapiens
cctggcaacatgtca

SEQ ID NO: 1901945 - DNA, 15 bp, Homo sapiens
ctggcaacatgtcag

SEQ ID NO: 1901946 - DNA, 15 bp, Homo sapiens
tggcaacatgtcagt

SEQ ID NO: 1901947 - DNA, 15 bp, Homo sapiens
ggcaacatgtcagtt

SEQ ID NO: 1901948 - DNA, 15 bp, Homo sapiens
gcaacatgtcagttt

SEQ ID NO: 1901949 - DNA, 15 bp, Homo sapiens
caacatgtcagtttt

SEQ ID NO: 1901950 - DNA, 15 bp, Homo sapiens
aacatgtcagttttt

SEQ ID NO: 1901951 - DNA, 15 bp, Homo sapiens
acatgtcagtttttg

SEQ ID NO: 1901952 - DNA, 15 bp, Homo sapiens
catgtcagtttttgt

SEQ ID NO: 1901953 - DNA, 15 bp, Homo sapiens
atgtcagtttttgtt

SEQ ID NO: 1901954 - DNA, 15 bp, Homo sapiens
tgtcagtttttgttc

SEQ ID NO: 1901955 - DNA, 15 bp, Homo sapiens
gtcagtttttgttct

SEQ ID NO: 1901956 - DNA, 15 bp, Homo sapiens
tcagtttttgttctg

SEQ ID NO: 1901957 - DNA, 15 bp, Homo sapiens
cagtttttgttctgc

SEQ ID NO: 1901958 - DNA, 15 bp, Homo sapiens
agtttttgttctgca

SEQ ID NO: 1901959 - DNA, 15 bp, Homo sapiens
gtttttgttctgcat

SEQ ID NO: 1901960 - DNA, 15 bp, Homo sapiens
tttttgttctgcata

SEQ ID NO: 1901961 - DNA, 15 bp, Homo sapiens
ttttgttctgcatag

SEQ ID NO: 1901962 - DNA, 15 bp, Homo sapiens
tttgttctgcatagt

SEQ ID NO: 1901963 - DNA, 15 bp, Homo sapiens
ttgttctgcatagtg

SEQ ID NO: 1901964 - DNA, 15 bp, Homo sapiens
tgttctgcatagtgg

SEQ ID NO: 1901965 - DNA, 15 bp, Homo sapiens
gttctgcatagtggg

SEQ ID NO: 1901966 - DNA, 15 bp, Homo sapiens
ttctgcatagtggga

SEQ ID NO: 1901967 - DNA, 15 bp, Homo sapiens
tctgcatagtgggat

SEQ ID NO: 1901968 - DNA, 15 bp, Homo sapiens
ctgcatagtgggatg

SEQ ID NO: 1901969 - DNA, 15 bp, Homo sapiens
tgcatagtgggatgg

SEQ ID NO: 1901970 - DNA, 15 bp, Homo sapiens
gcatagtgggatggt

SEQ ID NO: 1901971 - DNA, 15 bp, Homo sapiens
catagtgggatggtg

SEQ ID NO: 1901972 - DNA, 15 bp, Homo sapiens
atagtgggatggtgg

SEQ ID NO: 1901973 - DNA, 15 bp, Homo sapiens
tagtgggatggtggg

SEQ ID NO: 1901974 - DNA, 15 bp, Homo sapiens
agtgggatggtggga

SEQ ID NO: 1901975 - DNA, 15 bp, Homo sapiens
gtgggatggtgggat

SEQ ID NO: 1901976 - DNA, 15 bp, Homo sapiens
tgggatggtgggata

SEQ ID NO: 1901977 - DNA, 15 bp, Homo sapiens
gggatggtgggatat

SEQ ID NO: 1901978 - DNA, 15 bp, Homo sapiens
ggatggtgggatatg

SEQ ID NO: 1901979 - DNA, 15 bp, Homo sapiens
gatggtgggatatgg

SEQ ID NO: 1901980 - DNA, 15 bp, Homo sapiens
atggtgggatatgga

SEQ ID NO: 1901981 - DNA, 15 bp, Homo sapiens
tggtgggatatggat

SEQ ID NO: 1901982 - DNA, 15 bp, Homo sapiens
ggtgggatatggatg

SEQ ID NO: 1901983 - DNA, 15 bp, Homo sapiens
gtgggatatggatgt

SEQ ID NO: 1901984 - DNA, 15 bp, Homo sapiens
tgggatatggatgtt

SEQ ID NO: 1901985 - DNA, 15 bp, Homo sapiens
gggatatggatgttt

SEQ ID NO: 1901986 - DNA, 15 bp, Homo sapiens
ggatatggatgtttt

SEQ ID NO: 1901987 - DNA, 15 bp, Homo sapiens
gatatggatgttttt

SEQ ID NO: 1901988 - DNA, 15 bp, Homo sapiens
atatggatgttttta

SEQ ID NO: 1901989 - DNA, 15 bp, Homo sapiens
tatggatgtttttat

SEQ ID NO: 1901990 - DNA, 15 bp, Homo sapiens
atggatgtttttatc

SEQ ID NO: 1901991 - DNA, 15 bp, Homo sapiens
tggatgtttttatct

SEQ ID NO: 1901992 - DNA, 15 bp, Homo sapiens
ggatgtttttatctt

SEQ ID NO: 1901993 - DNA, 15 bp, Homo sapiens
gatgtttttatcttt

SEQ ID NO: 1901994 - DNA, 15 bp, Homo sapiens
atgtttttatctttt

SEQ ID NO: 1901995 - DNA, 15 bp, Homo sapiens
tgtttttatctttta

SEQ ID NO: 1901996 - DNA, 15 bp, Homo sapiens
gtttttatcttttat

SEQ ID NO: 1901997 - DNA, 15 bp, Homo sapiens
tttttatcttttatt

SEQ ID NO: 1901998 - DNA, 15 bp, Homo sapiens
ttttatcttttattt

SEQ ID NO: 1901999 - DNA, 15 bp, Homo sapiens
tttatcttttatttt

SEQ ID NO: 1902000 - DNA, 15 bp, Homo sapiens
ttatcttttattttc

SEQ ID NO: 1902001 - DNA, 15 bp, Homo sapiens
tatcttttattttct

SEQ ID NO: 1902002 - DNA, 15 bp, Homo sapiens
atcttttattttctt

SEQ ID NO: 1902003 - DNA, 15 bp, Homo sapiens
tcttttattttcttt

SEQ ID NO: 1902004 - DNA, 15 bp, Homo sapiens
cttttattttctttt

SEQ ID NO: 1902005 - DNA, 15 bp, Homo sapiens
ttttattttcttttt

SEQ ID NO: 1902006 - DNA, 15 bp, Homo sapiens
tttattttctttttt

SEQ ID NO: 1902007 - DNA, 15 bp, Homo sapiens
ttattttctttttta

SEQ ID NO: 1902008 - DNA, 15 bp, Homo sapiens
tattttcttttttat

SEQ ID NO: 1902009 - DNA, 15 bp, Homo sapiens
attttcttttttata

SEQ ID NO: 1902010 - DNA, 15 bp, Homo sapiens
ttttcttttttatat

SEQ ID NO: 1902011 - DNA, 15 bp, Homo sapiens
tttcttttttatatt

SEQ ID NO: 1902012 - DNA, 15 bp, Homo sapiens
ttcttttttatattt

SEQ ID NO: 1902013 - DNA, 15 bp, Homo sapiens
tcttttttatatttt

SEQ ID NO: 1902014 - DNA, 15 bp, Homo sapiens
cttttttatattttt

SEQ ID NO: 1902015 - DNA, 15 bp, Homo sapiens
ttttttatatttttc

SEQ ID NO: 1902016 - DNA, 15 bp, Homo sapiens
tttttatatttttct

SEQ ID NO: 1902017 - DNA, 15 bp, Homo sapiens
ttttatatttttcta

SEQ ID NO: 1902018 - DNA, 15 bp, Homo sapiens
tttatatttttctaa

SEQ ID NO: 1902019 - DNA, 15 bp, Homo sapiens
ttatatttttctaaa

SEQ ID NO: 1902020 - DNA, 15 bp, Homo sapiens
tatatttttctaaat

SEQ ID NO: 1902021 - DNA, 15 bp, Homo sapiens
atatttttctaaatt

SEQ ID NO: 1902022 - DNA, 15 bp, Homo sapiens
tatttttctaaattt

SEQ ID NO: 1902023 - DNA, 15 bp, Homo sapiens
atttttctaaatttt

SEQ ID NO: 1902024 - DNA, 15 bp, Homo sapiens
tttttctaaattttc

SEQ ID NO: 1902025 - DNA, 15 bp, Homo sapiens
ttttctaaattttcc

SEQ ID NO: 1902026 - DNA, 15 bp, Homo sapiens
tttctaaattttcca

SEQ ID NO: 1902027 - DNA, 15 bp, Homo sapiens
ttctaaattttccac

SEQ ID NO: 1902028 - DNA, 15 bp, Homo sapiens
tctaaattttccaca

SEQ ID NO: 1902029 - DNA, 15 bp, Homo sapiens
ctaaattttccacat

SEQ ID NO: 1902030 - DNA, 15 bp, Homo sapiens
taaattttccacatt

SEQ ID NO: 1902031 - DNA, 15 bp, Homo sapiens
aaattttccacattg

SEQ ID NO: 1902032 - DNA, 15 bp, Homo sapiens
aattttccacattga

SEQ ID NO: 1902033 - DNA, 15 bp, Homo sapiens
attttccacattgaa

SEQ ID NO: 1902034 - DNA, 15 bp, Homo sapiens
ttttccacattgaac

SEQ ID NO: 1902035 - DNA, 15 bp, Homo sapiens
tttccacattgaaca

SEQ ID NO: 1902036 - DNA, 15 bp, Homo sapiens
ttccacattgaacat

SEQ ID NO: 1902037 - DNA, 15 bp, Homo sapiens
tccacattgaacatt

SEQ ID NO: 1902038 - DNA, 15 bp, Homo sapiens
ccacattgaacatta

SEQ ID NO: 1902039 - DNA, 15 bp, Homo sapiens
cacattgaacattat

SEQ ID NO: 1902040 - DNA, 15 bp, Homo sapiens
acattgaacattatt

SEQ ID NO: 1902041 - DNA, 15 bp, Homo sapiens
cattgaacattattt

SEQ ID NO: 1902042 - DNA, 15 bp, Homo sapiens
attgaacattatttt

SEQ ID NO: 1902043 - DNA, 15 bp, Homo sapiens
ttgaacattatttta

SEQ ID NO: 1902044 - DNA, 15 bp, Homo sapiens
tgaacattattttat

SEQ ID NO: 1902045 - DNA, 15 bp, Homo sapiens
gaacattattttata

SEQ ID NO: 1902046 - DNA, 15 bp, Homo sapiens
aacattattttataa

SEQ ID NO: 1902047 - DNA, 15 bp, Homo sapiens
acattattttataat

SEQ ID NO: 1902048 - DNA, 15 bp, Homo sapiens
cattattttataatc

SEQ ID NO: 1902049 - DNA, 15 bp, Homo sapiens
attattttataatct

SEQ ID NO: 1902050 - DNA, 15 bp, Homo sapiens
ttattttataatctt

SEQ ID NO: 1902051 - DNA, 15 bp, Homo sapiens
attttataatctttc

SEQ ID NO: 1902052 - DNA, 15 bp, Homo sapiens
ttttataatctttca

SEQ ID NO: 1902053 - DNA, 15 bp, Homo sapiens
tttataatctttcaa

SEQ ID NO: 1902054 - DNA, 15 bp, Homo sapiens
ttataatctttcaaa

SEQ ID NO: 1902055 - DNA, 15 bp, Homo sapiens
tataatctttcaaac

SEQ ID NO: 1902056 - DNA, 15 bp, Homo sapiens
ataatctttcaaaca

SEQ ID NO: 1902057 - DNA, 15 bp, Homo sapiens
taatctttcaaacat

SEQ ID NO: 1902058 - DNA, 15 bp, Homo sapiens
aatctttcaaacata

SEQ ID NO: 1902059 - DNA, 15 bp, Homo sapiens
atctttcaaacatat

SEQ ID NO: 1902060 - DNA, 15 bp, Homo sapiens
tctttcaaacatatc

SEQ ID NO: 1902061 - DNA, 15 bp, Homo sapiens
ctttcaaacatatct

SEQ ID NO: 1902062 - DNA, 15 bp, Homo sapiens
tttcaaacatatctc

SEQ ID NO: 1902063 - DNA, 15 bp, Homo sapiens
ttcaaacatatctct

SEQ ID NO: 1902064 - DNA, 15 bp, Homo sapiens
tcaaacatatctctt

SEQ ID NO: 1902065 - DNA, 15 bp, Homo sapiens
caaacatatctctta

SEQ ID NO: 1902066 - DNA, 15 bp, Homo sapiens
aaacatatctcttaa

SEQ ID NO: 1902067 - DNA, 15 bp, Homo sapiens
aacatatctcttaaa

SEQ ID NO: 1902068 - DNA, 15 bp, Homo sapiens
acatatctcttaaaa

SEQ ID NO: 1902069 - DNA, 15 bp, Homo sapiens
catatctcttaaaag

SEQ ID NO: 1902070 - DNA, 15 bp, Homo sapiens
atatctcttaaaagg

SEQ ID NO: 1902071 - DNA, 15 bp, Homo sapiens
tatctcttaaaagga

SEQ ID NO: 1902072 - DNA, 15 bp, Homo sapiens
atctcttaaaaggac

SEQ ID NO: 1902073 - DNA, 15 bp, Homo sapiens
tctcttaaaaggact

SEQ ID NO: 1902074 - DNA, 15 bp, Homo sapiens
ctcttaaaaggactg

SEQ ID NO: 1902075 - DNA, 15 bp, Homo sapiens
tcttaaaaggactgg

SEQ ID NO: 1902076 - DNA, 15 bp, Homo sapiens
cttaaaaggactggt

SEQ ID NO: 1902077 - DNA, 15 bp, Homo sapiens
ttaaaaggactggtt

SEQ ID NO: 1902078 - DNA, 15 bp, Homo sapiens
taaaaggactggttc

SEQ ID NO: 1902079 - DNA, 15 bp, Homo sapiens
aaaaggactggttcc

SEQ ID NO: 1902080 - DNA, 15 bp, Homo sapiens
aaaggactggttcct

SEQ ID NO: 1902081 - DNA, 15 bp, Homo sapiens
aaggactggttccta

SEQ ID NO: 1902082 - DNA, 15 bp, Homo sapiens
aggactggttcctat

SEQ ID NO: 1902083 - DNA, 15 bp, Homo sapiens
ggactggttcctata

SEQ ID NO: 1902084 - DNA, 15 bp, Homo sapiens
gactggttcctatag

SEQ ID NO: 1902085 - DNA, 15 bp, Homo sapiens
actggttcctataga

SEQ ID NO: 1902086 - DNA, 15 bp, Homo sapiens
ctggttcctatagaa

SEQ ID NO: 1902087 - DNA, 15 bp, Homo sapiens
tggttcctatagaat

SEQ ID NO: 1902088 - DNA, 15 bp, Homo sapiens
ggttcctatagaatt

SEQ ID NO: 1902089 - DNA, 15 bp, Homo sapiens
gttcctatagaattc

SEQ ID NO: 1902090 - DNA, 15 bp, Homo sapiens
ttcctatagaattca

SEQ ID NO: 1902091 - DNA, 15 bp, Homo sapiens
tcctatagaattcag

SEQ ID NO: 1902092 - DNA, 15 bp, Homo sapiens
cctatagaattcagt

SEQ ID NO: 1902093 - DNA, 15 bp, Homo sapiens
ctatagaattcagtg

SEQ ID NO: 1902094 - DNA, 15 bp, Homo sapiens
tatagaattcagtgc

SEQ ID NO: 1902095 - DNA, 15 bp, Homo sapiens
atagaattcagtgca

SEQ ID NO: 1902096 - DNA, 15 bp, Homo sapiens
tagaattcagtgcaa

SEQ ID NO: 1902097 - DNA, 15 bp, Homo sapiens
agaattcagtgcaag

SEQ ID NO: 1902098 - DNA, 15 bp, Homo sapiens
gaattcagtgcaaga

SEQ ID NO: 1902099 - DNA, 15 bp, Homo sapiens
aattcagtgcaagaa

SEQ ID NO: 1902100 - DNA, 15 bp, Homo sapiens
attcagtgcaagaaa

SEQ ID NO: 1902101 - DNA, 15 bp, Homo sapiens
ttcagtgcaagaaat

SEQ ID NO: 1902102 - DNA, 15 bp, Homo sapiens
tcagtgcaagaaatc

SEQ ID NO: 1902103 - DNA, 15 bp, Homo sapiens
cagtgcaagaaatct

SEQ ID NO: 1902104 - DNA, 15 bp, Homo sapiens
agtgcaagaaatctt

SEQ ID NO: 1902105 - DNA, 15 bp, Homo sapiens
gtgcaagaaatcttc

SEQ ID NO: 1902106 - DNA, 15 bp, Homo sapiens
tgcaagaaatcttct

SEQ ID NO: 1902107 - DNA, 15 bp, Homo sapiens
gcaagaaatcttctg

SEQ ID NO: 1902108 - DNA, 15 bp, Homo sapiens
caagaaatcttctgt

SEQ ID NO: 1902109 - DNA, 15 bp, Homo sapiens
aagaaatcttctgtg

SEQ ID NO: 1902110 - DNA, 15 bp, Homo sapiens
agaaatcttctgtgt

SEQ ID NO: 1902111 - DNA, 15 bp, Homo sapiens
gaaatcttctgtgtt

SEQ ID NO: 1902112 - DNA, 15 bp, Homo sapiens
aaatcttctgtgttt

SEQ ID NO: 1902113 - DNA, 15 bp, Homo sapiens
aatcttctgtgtttc

SEQ ID NO: 1902114 - DNA, 15 bp, Homo sapiens
atcttctgtgtttct

SEQ ID NO: 1902115 - DNA, 15 bp, Homo sapiens
tcttctgtgtttctt

SEQ ID NO: 1902116 - DNA, 15 bp, Homo sapiens
cttctgtgtttcttt

SEQ ID NO: 1902117 - DNA, 15 bp, Homo sapiens
ttctgtgtttcttta

SEQ ID NO: 1902118 - DNA, 15 bp, Homo sapiens
tctgtgtttctttat

SEQ ID NO: 1902119 - DNA, 15 bp, Homo sapiens
ctgtgtttctttata

SEQ ID NO: 1902120 - DNA, 15 bp, Homo sapiens
tgtgtttctttatac

SEQ ID NO: 1902121 - DNA, 15 bp, Homo sapiens
gtgtttctttatact

SEQ ID NO: 1902122 - DNA, 15 bp, Homo sapiens
tgtttctttatactt

SEQ ID NO: 1902123 - DNA, 15 bp, Homo sapiens
gtttctttatacttt

SEQ ID NO: 1902124 - DNA, 15 bp, Homo sapiens
tttctttatactttg

SEQ ID NO: 1902125 - DNA, 15 bp, Homo sapiens
ttctttatactttgg

SEQ ID NO: 1902126 - DNA, 15 bp, Homo sapiens
tctttatactttggt

SEQ ID NO: 1902127 - DNA, 15 bp, Homo sapiens
ctttatactttggtt

SEQ ID NO: 1902128 - DNA, 15 bp, Homo sapiens
tttatactttggttg

SEQ ID NO: 1902129 - DNA, 15 bp, Homo sapiens
ttatactttggttgc

SEQ ID NO: 1902130 - DNA, 15 bp, Homo sapiens
tatactttggttgcc

SEQ ID NO: 1902131 - DNA, 15 bp, Homo sapiens
atactttggttgcct

SEQ ID NO: 1902132 - DNA, 15 bp, Homo sapiens
tactttggttgcctt

SEQ ID NO: 1902133 - DNA, 15 bp, Homo sapiens
actttggttgccttg

SEQ ID NO: 1902134 - DNA, 15 bp, Homo sapiens
ctttggttgccttga

SEQ ID NO: 1902135 - DNA, 15 bp, Homo sapiens
tttggttgccttgat

SEQ ID NO: 1902136 - DNA, 15 bp, Homo sapiens
ttggttgccttgatc

SEQ ID NO: 1902137 - DNA, 15 bp, Homo sapiens
tggttgccttgatca

SEQ ID NO: 1902138 - DNA, 15 bp, Homo sapiens
ggttgccttgatcac

SEQ ID NO: 1902139 - DNA, 15 bp, Homo sapiens
gttgccttgatcact

SEQ ID NO: 1902140 - DNA, 15 bp, Homo sapiens
ttgccttgatcactg

SEQ ID NO: 1902141 - DNA, 15 bp, Homo sapiens
tgccttgatcactgg

SEQ ID NO: 1902142 - DNA, 15 bp, Homo sapiens
gccttgatcactggg

SEQ ID NO: 1902143 - DNA, 15 bp, Homo sapiens
ccttgatcactgggc

SEQ ID NO: 1902144 - DNA, 15 bp, Homo sapiens
cttgatcactgggcc

SEQ ID NO: 1902145 - DNA, 15 bp, Homo sapiens
ttgatcactgggcct

SEQ ID NO: 1902146 - DNA, 15 bp, Homo sapiens
tgatcactgggcctt

SEQ ID NO: 1902147 - DNA, 15 bp, Homo sapiens
gatcactgggccttt

SEQ ID NO: 1902148 - DNA, 15 bp, Homo sapiens
atcactgggcctttc

SEQ ID NO: 1902149 - DNA, 15 bp, Homo sapiens
tcactgggcctttcc

SEQ ID NO: 1902150 - DNA, 15 bp, Homo sapiens
cactgggcctttcct

SEQ ID NO: 1902151 - DNA, 15 bp, Homo sapiens
actgggcctttcctg

SEQ ID NO: 1902152 - DNA, 15 bp, Homo sapiens
ctgggcctttcctga

SEQ ID NO: 1902153 - DNA, 15 bp, Homo sapiens
tgggcctttcctgac

SEQ ID NO: 1902154 - DNA, 15 bp, Homo sapiens
gggcctttcctgaca

SEQ ID NO: 1902155 - DNA, 15 bp, Homo sapiens
ggcctttcctgacag

SEQ ID NO: 1902156 - DNA, 15 bp, Homo sapiens
gcctttcctgacagc

SEQ ID NO: 1902157 - DNA, 15 bp, Homo sapiens
cctttcctgacagca

SEQ ID NO: 1902158 - DNA, 15 bp, Homo sapiens
ctttcctgacagcaa

SEQ ID NO: 1902159 - DNA, 15 bp, Homo sapiens
tttcctgacagcaaa

SEQ ID NO: 1902160 - DNA, 15 bp, Homo sapiens
ttcctgacagcaaag

SEQ ID NO: 1902161 - DNA, 15 bp, Homo sapiens
tcctgacagcaaaga

SEQ ID NO: 1902162 - DNA, 15 bp, Homo sapiens
cctgacagcaaagaa

SEQ ID NO: 1902163 - DNA, 15 bp, Homo sapiens
ctgacagcaaagaag

SEQ ID NO: 1902164 - DNA, 15 bp, Homo sapiens
tgacagcaaagaaga

SEQ ID NO: 1902165 - DNA, 15 bp, Homo sapiens
gacagcaaagaagag

SEQ ID NO: 1902166 - DNA, 15 bp, Homo sapiens
acagcaaagaagagg

SEQ ID NO: 1902167 - DNA, 15 bp, Homo sapiens
cagcaaagaagaggt

SEQ ID NO: 1902168 - DNA, 15 bp, Homo sapiens
agcaaagaagaggtt

SEQ ID NO: 1902169 - DNA, 15 bp, Homo sapiens
gcaaagaagaggtta

SEQ ID NO: 1902170 - DNA, 15 bp, Homo sapiens
caaagaagaggttag

SEQ ID NO: 1902171 - DNA, 15 bp, Homo sapiens
aaagaagaggttagt

SEQ ID NO: 1902172 - DNA, 15 bp, Homo sapiens
aagaagaggttagtg

SEQ ID NO: 1902173 - DNA, 15 bp, Homo sapiens
agaagaggttagtgt

SEQ ID NO: 1902174 - DNA, 15 bp, Homo sapiens
gaagaggttagtgta

SEQ ID NO: 1902175 - DNA, 15 bp, Homo sapiens
aagaggttagtgtag

SEQ ID NO: 1902176 - DNA, 15 bp, Homo sapiens
agaggttagtgtagg

SEQ ID NO: 1902177 - DNA, 15 bp, Homo sapiens
gaggttagtgtaggc

SEQ ID NO: 1902178 - DNA, 15 bp, Homo sapiens
aggttagtgtaggca

SEQ ID NO: 1902179 - DNA, 15 bp, Homo sapiens
ggttagtgtaggcag

SEQ ID NO: 1902180 - DNA, 15 bp, Homo sapiens
gttagtgtaggcagc

SEQ ID NO: 1902181 - DNA, 15 bp, Homo sapiens
ttagtgtaggcagca

SEQ ID NO: 1902182 - DNA, 15 bp, Homo sapiens
tagtgtaggcagcag

SEQ ID NO: 1902183 - DNA, 15 bp, Homo sapiens
agtgtaggcagcaga

SEQ ID NO: 1902184 - DNA, 15 bp, Homo sapiens
gtgtaggcagcagat

SEQ ID NO: 1902185 - DNA, 15 bp, Homo sapiens
tgtaggcagcagata

SEQ ID NO: 1902186 - DNA, 15 bp, Homo sapiens
gtaggcagcagataa

SEQ ID NO: 1902187 - DNA, 15 bp, Homo sapiens
taggcagcagataaa

SEQ ID NO: 1902188 - DNA, 15 bp, Homo sapiens
aggcagcagataaaa

SEQ ID NO: 1902189 - DNA, 15 bp, Homo sapiens
ggcagcagataaaac

SEQ ID NO: 1902190 - DNA, 15 bp, Homo sapiens
gcagcagataaaaca

SEQ ID NO: 1902191 - DNA, 15 bp, Homo sapiens
cagcagataaaacac

SEQ ID NO: 1902192 - DNA, 15 bp, Homo sapiens
agcagataaaacaca

SEQ ID NO: 1902193 - DNA, 15 bp, Homo sapiens
gcagataaaacacag

SEQ ID NO: 1902194 - DNA, 15 bp, Homo sapiens
cagataaaacacagg

SEQ ID NO: 1902195 - DNA, 15 bp, Homo sapiens
agataaaacacaggt

SEQ ID NO: 1902196 - DNA, 15 bp, Homo sapiens
gataaaacacaggta

SEQ ID NO: 1902197 - DNA, 15 bp, Homo sapiens
ataaaacacaggtat

SEQ ID NO: 1902198 - DNA, 15 bp, Homo sapiens
taaaacacaggtatg

SEQ ID NO: 1902199 - DNA, 15 bp, Homo sapiens
aaaacacaggtatgc

SEQ ID NO: 1902200 - DNA, 15 bp, Homo sapiens
aaacacaggtatgct

SEQ ID NO: 1902201 - DNA, 15 bp, Homo sapiens
aacacaggtatgctc

SEQ ID NO: 1902202 - DNA, 15 bp, Homo sapiens
acacaggtatgctct

SEQ ID NO: 1902203 - DNA, 15 bp, Homo sapiens
cacaggtatgctcta

SEQ ID NO: 1902204 - DNA, 15 bp, Homo sapiens
acaggtatgctctat

SEQ ID NO: 1902205 - DNA, 15 bp, Homo sapiens
caggtatgctctatt

SEQ ID NO: 1902206 - DNA, 15 bp, Homo sapiens
aggtatgctctattt

SEQ ID NO: 1902207 - DNA, 15 bp, Homo sapiens
ggtatgctctattta

SEQ ID NO: 1902208 - DNA, 15 bp, Homo sapiens
gtatgctctatttaa

SEQ ID NO: 1902209 - DNA, 15 bp, Homo sapiens
tatgctctatttaaa

SEQ ID NO: 1902210 - DNA, 15 bp, Homo sapiens
atgctctatttaaaa

SEQ ID NO: 1902211 - DNA, 15 bp, Homo sapiens
tgctctatttaaaat

SEQ ID NO: 1902212 - DNA, 15 bp, Homo sapiens
gctctatttaaaatg

SEQ ID NO: 1902213 - DNA, 15 bp, Homo sapiens
ctctatttaaaatgc

SEQ ID NO: 1902214 - DNA, 15 bp, Homo sapiens
tctatttaaaatgca

SEQ ID NO: 1902215 - DNA, 15 bp, Homo sapiens
ctatttaaaatgcat

SEQ ID NO: 1902216 - DNA, 15 bp, Homo sapiens
tatttaaaatgcatg

SEQ ID NO: 1902217 - DNA, 15 bp, Homo sapiens
atttaaaatgcatgt

SEQ ID NO: 1902218 - DNA, 15 bp, Homo sapiens
tttaaaatgcatgta

SEQ ID NO: 1902219 - DNA, 15 bp, Homo sapiens
ttaaaatgcatgtat

SEQ ID NO: 1902220 - DNA, 15 bp, Homo sapiens
taaaatgcatgtatt

SEQ ID NO: 1902221 - DNA, 15 bp, Homo sapiens
aaaatgcatgtattt

SEQ ID NO: 1902222 - DNA, 15 bp, Homo sapiens
aaatgcatgtattta

SEQ ID NO: 1902223 - DNA, 15 bp, Homo sapiens
aatgcatgtatttat

SEQ ID NO: 1902224 - DNA, 15 bp, Homo sapiens
atgcatgtatttata

SEQ ID NO: 1902225 - DNA, 15 bp, Homo sapiens
tgcatgtatttataa

SEQ ID NO: 1902226 - DNA, 15 bp, Homo sapiens
gcatgtatttataat

SEQ ID NO: 1902227 - DNA, 15 bp, Homo sapiens
catgtatttataata

SEQ ID NO: 1902228 - DNA, 15 bp, Homo sapiens
atgtatttataataa

SEQ ID NO: 1902229 - DNA, 15 bp, Homo sapiens
tgtatttataataaa

SEQ ID NO: 1902230 - DNA, 15 bp, Homo sapiens
gtatttataataaaa

SEQ ID NO: 1902231 - DNA, 15 bp, Homo sapiens
tatttataataaaag

SEQ ID NO: 1902232 - DNA, 15 bp, Homo sapiens
atttataataaaagt

SEQ ID NO: 1902233 - DNA, 15 bp, Homo sapiens
tttataataaaagta

SEQ ID NO: 1902234 - DNA, 15 bp, Homo sapiens
ttataataaaagtat

SEQ ID NO: 1902235 - DNA, 15 bp, Homo sapiens
tataataaaagtata

SEQ ID NO: 1902236 - DNA, 15 bp, Homo sapiens
ataataaaagtatag

SEQ ID NO: 1902237 - DNA, 15 bp, Homo sapiens
taataaaagtatagg

SEQ ID NO: 1902238 - DNA, 15 bp, Homo sapiens
aataaaagtataggt

SEQ ID NO: 1902239 - DNA, 15 bp, Homo sapiens
ataaaagtataggtg

SEQ ID NO: 1902240 - DNA, 15 bp, Homo sapiens
taaaagtataggtgg

SEQ ID NO: 1902241 - DNA, 15 bp, Homo sapiens
aaaagtataggtggt

SEQ ID NO: 1902242 - DNA, 15 bp, Homo sapiens
aaagtataggtggta

SEQ ID NO: 1902243 - DNA, 15 bp, Homo sapiens
aagtataggtggtac

SEQ ID NO: 1902244 - DNA, 15 bp, Homo sapiens
agtataggtggtacc

SEQ ID NO: 1902245 - DNA, 15 bp, Homo sapiens
gtataggtggtaccc

SEQ ID NO: 1902246 - DNA, 15 bp, Homo sapiens
tataggtggtaccca

SEQ ID NO: 1902247 - DNA, 15 bp, Homo sapiens
ataggtggtacccaa

SEQ ID NO: 1902248 - DNA, 15 bp, Homo sapiens
taggtggtacccaaa

SEQ ID NO: 1902249 - DNA, 15 bp, Homo sapiens
aggtggtacccaaag

SEQ ID NO: 1902250 - DNA, 15 bp, Homo sapiens
ggtggtacccaaagg

SEQ ID NO: 1902251 - DNA, 15 bp, Homo sapiens
gtggtacccaaagga

SEQ ID NO: 1902252 - DNA, 15 bp, Homo sapiens
tggtacccaaaggaa

SEQ ID NO: 1902253 - DNA, 15 bp, Homo sapiens
ggtacccaaaggaaa

SEQ ID NO: 1902254 - DNA, 15 bp, Homo sapiens
gtacccaaaggaaaa

SEQ ID NO: 1902255 - DNA, 15 bp, Homo sapiens
tacccaaaggaaaat

SEQ ID NO: 1902256 - DNA, 15 bp, Homo sapiens
acccaaaggaaaatg

SEQ ID NO: 1902257 - DNA, 15 bp, Homo sapiens
cccaaaggaaaatgt

SEQ ID NO: 1902258 - DNA, 15 bp, Homo sapiens
ccaaaggaaaatgtc

SEQ ID NO: 1902259 - DNA, 15 bp, Homo sapiens
caaaggaaaatgtca

SEQ ID NO: 1902260 - DNA, 15 bp, Homo sapiens
aaaggaaaatgtcat

SEQ ID NO: 1902261 - DNA, 15 bp, Homo sapiens
aaggaaaatgtcatg

SEQ ID NO: 1902262 - DNA, 15 bp, Homo sapiens
aggaaaatgtcatga

SEQ ID NO: 1902263 - DNA, 15 bp, Homo sapiens
ggaaaatgtcatgac

SEQ ID NO: 1902264 - DNA, 15 bp, Homo sapiens
gaaaatgtcatgaca

SEQ ID NO: 1902265 - DNA, 15 bp, Homo sapiens
aaaatgtcatgacac

SEQ ID NO: 1902266 - DNA, 15 bp, Homo sapiens
aaatgtcatgacaca

SEQ ID NO: 1902267 - DNA, 15 bp, Homo sapiens
aatgtcatgacacat

SEQ ID NO: 1902268 - DNA, 15 bp, Homo sapiens
atgtcatgacacatt

SEQ ID NO: 1902269 - DNA, 15 bp, Homo sapiens
tgtcatgacacattg

SEQ ID NO: 1902270 - DNA, 15 bp, Homo sapiens
gtcatgacacattgc

SEQ ID NO: 1902271 - DNA, 15 bp, Homo sapiens
tcatgacacattgca

SEQ ID NO: 1902272 - DNA, 15 bp, Homo sapiens
catgacacattgcaa

SEQ ID NO: 1902273 - DNA, 15 bp, Homo sapiens
atgacacattgcaaa

SEQ ID NO: 1902274 - DNA, 15 bp, Homo sapiens
tgacacattgcaaag

SEQ ID NO: 1902275 - DNA, 15 bp, Homo sapiens
gacacattgcaaagt

SEQ ID NO: 1902276 - DNA, 15 bp, Homo sapiens
acacattgcaaagtg

SEQ ID NO: 1902277 - DNA, 15 bp, Homo sapiens
cacattgcaaagtgg

SEQ ID NO: 1902278 - DNA, 15 bp, Homo sapiens
acattgcaaagtgga

SEQ ID NO: 1902279 - DNA, 15 bp, Homo sapiens
cattgcaaagtggaa

SEQ ID NO: 1902280 - DNA, 15 bp, Homo sapiens
attgcaaagtggaac

SEQ ID NO: 1902281 - DNA, 15 bp, Homo sapiens
ttgcaaagtggaaca

SEQ ID NO: 1902282 - DNA, 15 bp, Homo sapiens
tgcaaagtggaacag

SEQ ID NO: 1902283 - DNA, 15 bp, Homo sapiens
gcaaagtggaacaga

SEQ ID NO: 1902284 - DNA, 15 bp, Homo sapiens
caaagtggaacagaa

SEQ ID NO: 1902285 - DNA, 15 bp, Homo sapiens
aaagtggaacagaag

SEQ ID NO: 1902286 - DNA, 15 bp, Homo sapiens
aagtggaacagaagt

SEQ ID NO: 1902287 - DNA, 15 bp, Homo sapiens
agtggaacagaagtt

SEQ ID NO: 1902288 - DNA, 15 bp, Homo sapiens
gtggaacagaagtta

SEQ ID NO: 1902289 - DNA, 15 bp, Homo sapiens
tggaacagaagttat

SEQ ID NO: 1902290 - DNA, 15 bp, Homo sapiens
ggaacagaagttatc

SEQ ID NO: 1902291 - DNA, 15 bp, Homo sapiens
gaacagaagttatct

SEQ ID NO: 1902292 - DNA, 15 bp, Homo sapiens
aacagaagttatctt

SEQ ID NO: 1902293 - DNA, 15 bp, Homo sapiens
acagaagttatcttt

SEQ ID NO: 1902294 - DNA, 15 bp, Homo sapiens
cagaagttatcttta

SEQ ID NO: 1902295 - DNA, 15 bp, Homo sapiens
agaagttatctttag

SEQ ID NO: 1902296 - DNA, 15 bp, Homo sapiens
gaagttatctttaga

SEQ ID NO: 1902297 - DNA, 15 bp, Homo sapiens
aagttatctttagat

SEQ ID NO: 1902298 - DNA, 15 bp, Homo sapiens
agttatctttagatc

SEQ ID NO: 1902299 - DNA, 15 bp, Homo sapiens
gttatctttagatca

SEQ ID NO: 1902300 - DNA, 15 bp, Homo sapiens
ttatctttagatcac

SEQ ID NO: 1902301 - DNA, 15 bp, Homo sapiens
tatctttagatcact

SEQ ID NO: 1902302 - DNA, 15 bp, Homo sapiens
atctttagatcactt

SEQ ID NO: 1902303 - DNA, 15 bp, Homo sapiens
tctttagatcacttt

SEQ ID NO: 1902304 - DNA, 15 bp, Homo sapiens
ctttagatcactttc

SEQ ID NO: 1902305 - DNA, 15 bp, Homo sapiens
tttagatcactttct

SEQ ID NO: 1902306 - DNA, 15 bp, Homo sapiens
ttagatcactttctg

SEQ ID NO: 1902307 - DNA, 15 bp, Homo sapiens
tagatcactttctgt

SEQ ID NO: 1902308 - DNA, 15 bp, Homo sapiens
agatcactttctgtt

SEQ ID NO: 1902309 - DNA, 15 bp, Homo sapiens
gatcactttctgttc

SEQ ID NO: 1902310 - DNA, 15 bp, Homo sapiens
atcactttctgttct

SEQ ID NO: 1902311 - DNA, 15 bp, Homo sapiens
tcactttctgttctg

SEQ ID NO: 1902312 - DNA, 15 bp, Homo sapiens
cactttctgttctgg

SEQ ID NO: 1902313 - DNA, 15 bp, Homo sapiens
actttctgttctgga

SEQ ID NO: 1902314 - DNA, 15 bp, Homo sapiens
ctttctgttctggat

SEQ ID NO: 1902315 - DNA, 15 bp, Homo sapiens
tttctgttctggatt

SEQ ID NO: 1902316 - DNA, 15 bp, Homo sapiens
ttctgttctggatta

SEQ ID NO: 1902317 - DNA, 15 bp, Homo sapiens
tctgttctggattat

SEQ ID NO: 1902318 - DNA, 15 bp, Homo sapiens
ctgttctggattatt

SEQ ID NO: 1902319 - DNA, 15 bp, Homo sapiens
tgttctggattattg

SEQ ID NO: 1902320 - DNA, 15 bp, Homo sapiens
gttctggattattgt

SEQ ID NO: 1902321 - DNA, 15 bp, Homo sapiens
ttctggattattgta

SEQ ID NO: 1902322 - DNA, 15 bp, Homo sapiens
tctggattattgtat

SEQ ID NO: 1902323 - DNA, 15 bp, Homo sapiens
ctggattattgtatg

SEQ ID NO: 1902324 - DNA, 15 bp, Homo sapiens
tggattattgtatga

SEQ ID NO: 1902325 - DNA, 15 bp, Homo sapiens
ggattattgtatgag

SEQ ID NO: 1902326 - DNA, 15 bp, Homo sapiens
gattattgtatgagc

SEQ ID NO: 1902327 - DNA, 15 bp, Homo sapiens
attattgtatgagcc

SEQ ID NO: 1902328 - DNA, 15 bp, Homo sapiens
ttattgtatgagcct

SEQ ID NO: 1902329 - DNA, 15 bp, Homo sapiens
tattgtatgagcctg

SEQ ID NO: 1902330 - DNA, 15 bp, Homo sapiens
attgtatgagcctga

SEQ ID NO: 1902331 - DNA, 15 bp, Homo sapiens
ttgtatgagcctgat

SEQ ID NO: 1902332 - DNA, 15 bp, Homo sapiens
tgtatgagcctgatt

SEQ ID NO: 1902333 - DNA, 15 bp, Homo sapiens
gtatgagcctgattt

SEQ ID NO: 1902334 - DNA, 15 bp, Homo sapiens
tatgagcctgatttt

SEQ ID NO: 1902335 - DNA, 15 bp, Homo sapiens
atgagcctgattttc

SEQ ID NO: 1902336 - DNA, 15 bp, Homo sapiens
tgagcctgattttcg

SEQ ID NO: 1902337 - DNA, 15 bp, Homo sapiens
gagcctgattttcgt

SEQ ID NO: 1902338 - DNA, 15 bp, Homo sapiens
agcctgattttcgtc

SEQ ID NO: 1902339 - DNA, 15 bp, Homo sapiens
gcctgattttcgtct

SEQ ID NO: 1902340 - DNA, 15 bp, Homo sapiens
cctgattttcgtctc

SEQ ID NO: 1902341 - DNA, 15 bp, Homo sapiens
ctgattttcgtctct

SEQ ID NO: 1902342 - DNA, 15 bp, Homo sapiens
tgattttcgtctctc

SEQ ID NO: 1902343 - DNA, 15 bp, Homo sapiens
gattttcgtctctct

SEQ ID NO: 1902344 - DNA, 15 bp, Homo sapiens
attttcgtctctctt

SEQ ID NO: 1902345 - DNA, 15 bp, Homo sapiens
ttttcgtctctcttt

SEQ ID NO: 1902346 - DNA, 15 bp, Homo sapiens
tttcgtctctctttc

SEQ ID NO: 1902347 - DNA, 15 bp, Homo sapiens
ttcgtctctctttcc

SEQ ID NO: 1902348 - DNA, 15 bp, Homo sapiens
tcgtctctctttccg

SEQ ID NO: 1902349 - DNA, 15 bp, Homo sapiens
cgtctctctttccgc

SEQ ID NO: 1902350 - DNA, 15 bp, Homo sapiens
gtctctctttccgcc

SEQ ID NO: 1902351 - DNA, 15 bp, Homo sapiens
tctctctttccgcct

SEQ ID NO: 1902352 - DNA, 15 bp, Homo sapiens
ctctctttccgcctt

SEQ ID NO: 1902353 - DNA, 15 bp, Homo sapiens
tctctttccgccttc

SEQ ID NO: 1902354 - DNA, 15 bp, Homo sapiens
ctctttccgccttcc

SEQ ID NO: 1902355 - DNA, 15 bp, Homo sapiens
tctttccgccttccc

SEQ ID NO: 1902356 - DNA, 15 bp, Homo sapiens
ctttccgccttccct

SEQ ID NO: 1902357 - DNA, 15 bp, Homo sapiens
tttccgccttccctc

SEQ ID NO: 1902358 - DNA, 15 bp, Homo sapiens
ttccgccttccctca

SEQ ID NO: 1902359 - DNA, 15 bp, Homo sapiens
tccgccttccctcac

SEQ ID NO: 1902360 - DNA, 15 bp, Homo sapiens
ccgccttccctcacc

SEQ ID NO: 1902361 - DNA, 15 bp, Homo sapiens
cgccttccctcaccc

SEQ ID NO: 1902362 - DNA, 15 bp, Homo sapiens
gccttccctcaccct

SEQ ID NO: 1902363 - DNA, 15 bp, Homo sapiens
ccttccctcaccctc

SEQ ID NO: 1902364 - DNA, 15 bp, Homo sapiens
cttccctcaccctcg

SEQ ID NO: 1902365 - DNA, 15 bp, Homo sapiens
ttccctcaccctcgt

SEQ ID NO: 1902366 - DNA, 15 bp, Homo sapiens
tccctcaccctcgtt

SEQ ID NO: 1902367 - DNA, 15 bp, Homo sapiens
ccctcaccctcgttg

SEQ ID NO: 1902368 - DNA, 15 bp, Homo sapiens
cctcaccctcgttgt

SEQ ID NO: 1902369 - DNA, 15 bp, Homo sapiens
ctcaccctcgttgta

SEQ ID NO: 1902370 - DNA, 15 bp, Homo sapiens
tcaccctcgttgtaa

SEQ ID NO: 1902371 - DNA, 15 bp, Homo sapiens
caccctcgttgtaaa

SEQ ID NO: 1902372 - DNA, 15 bp, Homo sapiens
accctcgttgtaaat

SEQ ID NO: 1902373 - DNA, 15 bp, Homo sapiens
ccctcgttgtaaatc

SEQ ID NO: 1902374 - DNA, 15 bp, Homo sapiens
cctcgttgtaaatcc

SEQ ID NO: 1902375 - DNA, 15 bp, Homo sapiens
ctcgttgtaaatcca

SEQ ID NO: 1902376 - DNA, 15 bp, Homo sapiens
tcgttgtaaatccac

SEQ ID NO: 1902377 - DNA, 15 bp, Homo sapiens
cgttgtaaatccact

SEQ ID NO: 1902378 - DNA, 15 bp, Homo sapiens
gttgtaaatccacta

SEQ ID NO: 1902379 - DNA, 15 bp, Homo sapiens
ttgtaaatccactag

SEQ ID NO: 1902380 - DNA, 15 bp, Homo sapiens
tgtaaatccactagt

SEQ ID NO: 1902381 - DNA, 15 bp, Homo sapiens
gtaaatccactagtg

SEQ ID NO: 1902382 - DNA, 15 bp, Homo sapiens
taaatccactagtgc

SEQ ID NO: 1902383 - DNA, 15 bp, Homo sapiens
aaatccactagtgca

SEQ ID NO: 1902384 - DNA, 15 bp, Homo sapiens
aatccactagtgcat

SEQ ID NO: 1902385 - DNA, 15 bp, Homo sapiens
atccactagtgcatg

SEQ ID NO: 1902386 - DNA, 15 bp, Homo sapiens
tccactagtgcatgg

SEQ ID NO: 1902387 - DNA, 15 bp, Homo sapiens
ccactagtgcatgga

SEQ ID NO: 1902388 - DNA, 15 bp, Homo sapiens
cactagtgcatggat

SEQ ID NO: 1902389 - DNA, 15 bp, Homo sapiens
actagtgcatggatg

SEQ ID NO: 1902390 - DNA, 15 bp, Homo sapiens
ctagtgcatggatgt

SEQ ID NO: 1902391 - DNA, 15 bp, Homo sapiens
tagtgcatggatgtg

SEQ ID NO: 1902392 - DNA, 15 bp, Homo sapiens
gtgcatggatgtgaa

SEQ ID NO: 1902393 - DNA, 15 bp, Homo sapiens
tgcatggatgtgaag

SEQ ID NO: 1902394 - DNA, 15 bp, Homo sapiens
gcatggatgtgaagt

SEQ ID NO: 1902395 - DNA, 15 bp, Homo sapiens
catggatgtgaagta

SEQ ID NO: 1902396 - DNA, 15 bp, Homo sapiens
atggatgtgaagtac

SEQ ID NO: 1902397 - DNA, 15 bp, Homo sapiens
tggatgtgaagtaca

SEQ ID NO: 1902398 - DNA, 15 bp, Homo sapiens
ggatgtgaagtacaa

SEQ ID NO: 1902399 - DNA, 15 bp, Homo sapiens
gatgtgaagtacaag

SEQ ID NO: 1902400 - DNA, 15 bp, Homo sapiens
atgtgaagtacaagt

SEQ ID NO: 1902401 - DNA, 15 bp, Homo sapiens
tgtgaagtacaagtc

SEQ ID NO: 1902402 - DNA, 15 bp, Homo sapiens
gtgaagtacaagtct

SEQ ID NO: 1902403 - DNA, 15 bp, Homo sapiens
tgaagtacaagtctt

SEQ ID NO: 1902404 - DNA, 15 bp, Homo sapiens
gaagtacaagtctta

SEQ ID NO: 1902405 - DNA, 15 bp, Homo sapiens
aagtacaagtcttaa

SEQ ID NO: 1902406 - DNA, 15 bp, Homo sapiens
agtacaagtcttaac

SEQ ID NO: 1902407 - DNA, 15 bp, Homo sapiens
gtacaagtcttaact

SEQ ID NO: 1902408 - DNA, 15 bp, Homo sapiens
tacaagtcttaactt

SEQ ID NO: 1902409 - DNA, 15 bp, Homo sapiens
acaagtcttaacttt

SEQ ID NO: 1902410 - DNA, 15 bp, Homo sapiens
caagtcttaacttta

SEQ ID NO: 1902411 - DNA, 15 bp, Homo sapiens
aagtcttaactttaa

SEQ ID NO: 1902412 - DNA, 15 bp, Homo sapiens
agtcttaactttaaa

SEQ ID NO: 1902413 - DNA, 15 bp, Homo sapiens
gtcttaactttaaaa

SEQ ID NO: 1902414 - DNA, 15 bp, Homo sapiens
tcttaactttaaaaa

SEQ ID NO: 1902415 - DNA, 15 bp, Homo sapiens
cttaactttaaaaag

SEQ ID NO: 1902416 - DNA, 15 bp, Homo sapiens
ttaactttaaaaagt

SEQ ID NO: 1902417 - DNA, 15 bp, Homo sapiens
taactttaaaaagtt

SEQ ID NO: 1902418 - DNA, 15 bp, Homo sapiens
aactttaaaaagttt

SEQ ID NO: 1902419 - DNA, 15 bp, Homo sapiens
actttaaaaagtttt

SEQ ID NO: 1902420 - DNA, 15 bp, Homo sapiens
ctttaaaaagtttta

SEQ ID NO: 1902421 - DNA, 15 bp, Homo sapiens
tttaaaaagttttat

SEQ ID NO: 1902422 - DNA, 15 bp, Homo sapiens
ttaaaaagttttatg

SEQ ID NO: 1902423 - DNA, 15 bp, Homo sapiens
taaaaagttttatga

SEQ ID NO: 1902424 - DNA, 15 bp, Homo sapiens
aaaaagttttatgaa

SEQ ID NO: 1902425 - DNA, 15 bp, Homo sapiens
aaaagttttatgaag

SEQ ID NO: 1902426 - DNA, 15 bp, Homo sapiens
aaagttttatgaagc

SEQ ID NO: 1902427 - DNA, 15 bp, Homo sapiens
aagttttatgaagct

SEQ ID NO: 1902428 - DNA, 15 bp, Homo sapiens
agttttatgaagctg

SEQ ID NO: 1902429 - DNA, 15 bp, Homo sapiens
gttttatgaagctgt

SEQ ID NO: 1902430 - DNA, 15 bp, Homo sapiens
ttttatgaagctgtg

SEQ ID NO: 1902431 - DNA, 15 bp, Homo sapiens
tttatgaagctgtgt

SEQ ID NO: 1902432 - DNA, 15 bp, Homo sapiens
ttatgaagctgtgta

SEQ ID NO: 1902433 - DNA, 15 bp, Homo sapiens
tatgaagctgtgtag

SEQ ID NO: 1902434 - DNA, 15 bp, Homo sapiens
atgaagctgtgtagt

SEQ ID NO: 1902435 - DNA, 15 bp, Homo sapiens
tgaagctgtgtagta

SEQ ID NO: 1902436 - DNA, 15 bp, Homo sapiens
gaagctgtgtagtaa

SEQ ID NO: 1902437 - DNA, 15 bp, Homo sapiens
aagctgtgtagtaaa

SEQ ID NO: 1902438 - DNA, 15 bp, Homo sapiens
agctgtgtagtaaat

SEQ ID NO: 1902439 - DNA, 15 bp, Homo sapiens
gctgtgtagtaaatc

SEQ ID NO: 1902440 - DNA, 15 bp, Homo sapiens
ctgtgtagtaaatcc

SEQ ID NO: 1902441 - DNA, 15 bp, Homo sapiens
tgtgtagtaaatccc

SEQ ID NO: 1902442 - DNA, 15 bp, Homo sapiens
gtgtagtaaatccct

SEQ ID NO: 1902443 - DNA, 15 bp, Homo sapiens
tgtagtaaatccctt

SEQ ID NO: 1902444 - DNA, 15 bp, Homo sapiens
gtagtaaatcccttt

SEQ ID NO: 1902445 - DNA, 15 bp, Homo sapiens
tagtaaatccctttt

SEQ ID NO: 1902446 - DNA, 15 bp, Homo sapiens
agtaaatcccttttg

SEQ ID NO: 1902447 - DNA, 15 bp, Homo sapiens
gtaaatcccttttgt

SEQ ID NO: 1902448 - DNA, 15 bp, Homo sapiens
taaatcccttttgta

SEQ ID NO: 1902449 - DNA, 15 bp, Homo sapiens
aaatcccttttgtaa

SEQ ID NO: 1902450 - DNA, 15 bp, Homo sapiens
aatcccttttgtaag

SEQ ID NO: 1902451 - DNA, 15 bp, Homo sapiens
atcccttttgtaagt

SEQ ID NO: 1902452 - DNA, 15 bp, Homo sapiens
tcccttttgtaagtg

SEQ ID NO: 1902453 - DNA, 15 bp, Homo sapiens
cccttttgtaagtgg

SEQ ID NO: 1902454 - DNA, 15 bp, Homo sapiens
ccttttgtaagtggt

SEQ ID NO: 1902455 - DNA, 15 bp, Homo sapiens
cttttgtaagtggtc

SEQ ID NO: 1902456 - DNA, 15 bp, Homo sapiens
ttttgtaagtggtct

SEQ ID NO: 1902457 - DNA, 15 bp, Homo sapiens
tttgtaagtggtctt

SEQ ID NO: 1902458 - DNA, 15 bp, Homo sapiens
ttgtaagtggtcttg

SEQ ID NO: 1902459 - DNA, 15 bp, Homo sapiens
tgtaagtggtcttga

SEQ ID NO: 1902460 - DNA, 15 bp, Homo sapiens
gtaagtggtcttgac

SEQ ID NO: 1902461 - DNA, 15 bp, Homo sapiens
taagtggtcttgact

SEQ ID NO: 1902462 - DNA, 15 bp, Homo sapiens
aagtggtcttgactg

SEQ ID NO: 1902463 - DNA, 15 bp, Homo sapiens
agtggtcttgactgc

SEQ ID NO: 1902464 - DNA, 15 bp, Homo sapiens
gtggtcttgactgcg

SEQ ID NO: 1902465 - DNA, 15 bp, Homo sapiens
tggtcttgactgcgt

SEQ ID NO: 1902466 - DNA, 15 bp, Homo sapiens
ggtcttgactgcgtt

SEQ ID NO: 1902467 - DNA, 15 bp, Homo sapiens
gtcttgactgcgttt

SEQ ID NO: 1902468 - DNA, 15 bp, Homo sapiens
tcttgactgcgtttc

SEQ ID NO: 1902469 - DNA, 15 bp, Homo sapiens
cttgactgcgtttct

SEQ ID NO: 1902470 - DNA, 15 bp, Homo sapiens
ttgactgcgtttctc

SEQ ID NO: 1902471 - DNA, 15 bp, Homo sapiens
tgactgcgtttctca

SEQ ID NO: 1902472 - DNA, 15 bp, Homo sapiens
gactgcgtttctcaa

SEQ ID NO: 1902473 - DNA, 15 bp, Homo sapiens
actgcgtttctcaat

SEQ ID NO: 1902474 - DNA, 15 bp, Homo sapiens
ctgcgtttctcaata

SEQ ID NO: 1902475 - DNA, 15 bp, Homo sapiens
tgcgtttctcaatat

SEQ ID NO: 1902476 - DNA, 15 bp, Homo sapiens
gcgtttctcaatata

SEQ ID NO: 1902477 - DNA, 15 bp, Homo sapiens
cgtttctcaatatat

SEQ ID NO: 1902478 - DNA, 15 bp, Homo sapiens
gtttctcaatatatc

SEQ ID NO: 1902479 - DNA, 15 bp, Homo sapiens
tttctcaatatatct

SEQ ID NO: 1902480 - DNA, 15 bp, Homo sapiens
ttctcaatatatctt

SEQ ID NO: 1902481 - DNA, 15 bp, Homo sapiens
tctcaatatatcttt

SEQ ID NO: 1902482 - DNA, 15 bp, Homo sapiens
ctcaatatatctttt

SEQ ID NO: 1902483 - DNA, 15 bp, Homo sapiens
tcaatatatcttttg

SEQ ID NO: 1902484 - DNA, 15 bp, Homo sapiens
caatatatcttttgg

SEQ ID NO: 1902485 - DNA, 15 bp, Homo sapiens
aatatatcttttggt

SEQ ID NO: 1902486 - DNA, 15 bp, Homo sapiens
atatatcttttggtt

SEQ ID NO: 1902487 - DNA, 15 bp, Homo sapiens
tatatcttttggttt

SEQ ID NO: 1902488 - DNA, 15 bp, Homo sapiens
atatcttttggtttc

SEQ ID NO: 1902489 - DNA, 15 bp, Homo sapiens
tatcttttggtttca

SEQ ID NO: 1902490 - DNA, 15 bp, Homo sapiens
atcttttggtttcat

SEQ ID NO: 1902491 - DNA, 15 bp, Homo sapiens
tcttttggtttcatt

SEQ ID NO: 1902492 - DNA, 15 bp, Homo sapiens
cttttggtttcatta

SEQ ID NO: 1902493 - DNA, 15 bp, Homo sapiens
ttttggtttcattag

SEQ ID NO: 1902494 - DNA, 15 bp, Homo sapiens
tttggtttcattaga

SEQ ID NO: 1902495 - DNA, 15 bp, Homo sapiens
ttggtttcattagat

SEQ ID NO: 1902496 - DNA, 15 bp, Homo sapiens
tggtttcattagatt

SEQ ID NO: 1902497 - DNA, 15 bp, Homo sapiens
ggtttcattagattc

SEQ ID NO: 1902498 - DNA, 15 bp, Homo sapiens
gtttcattagattca

SEQ ID NO: 1902499 - DNA, 15 bp, Homo sapiens
tttcattagattcaa

SEQ ID NO: 1902500 - DNA, 15 bp, Homo sapiens
ttcattagattcaag

SEQ ID NO: 1902501 - DNA, 15 bp, Homo sapiens
tcattagattcaagt

SEQ ID NO: 1902502 - DNA, 15 bp, Homo sapiens
cattagattcaagta

SEQ ID NO: 1902503 - DNA, 15 bp, Homo sapiens
attagattcaagtat

SEQ ID NO: 1902504 - DNA, 15 bp, Homo sapiens
ttagattcaagtata

SEQ ID NO: 1902505 - DNA, 15 bp, Homo sapiens
tagattcaagtatat

SEQ ID NO: 1902506 - DNA, 15 bp, Homo sapiens
agattcaagtatata

SEQ ID NO: 1902507 - DNA, 15 bp, Homo sapiens
gattcaagtatataa

SEQ ID NO: 1902508 - DNA, 15 bp, Homo sapiens
attcaagtatataaa

SEQ ID NO: 1902509 - DNA, 15 bp, Homo sapiens
ttcaagtatataaat

SEQ ID NO: 1902510 - DNA, 15 bp, Homo sapiens
tcaagtatataaatg

SEQ ID NO: 1902511 - DNA, 15 bp, Homo sapiens
caagtatataaatga

SEQ ID NO: 1902512 - DNA, 15 bp, Homo sapiens
aagtatataaatgag

SEQ ID NO: 1902513 - DNA, 15 bp, Homo sapiens
agtatataaatgaga

SEQ ID NO: 1902514 - DNA, 15 bp, Homo sapiens
gtatataaatgagaa

SEQ ID NO: 1902515 - DNA, 15 bp, Homo sapiens
tatataaatgagaac

SEQ ID NO: 1902516 - DNA, 15 bp, Homo sapiens
atataaatgagaact

SEQ ID NO: 1902517 - DNA, 15 bp, Homo sapiens
tataaatgagaactg

SEQ ID NO: 1902518 - DNA, 15 bp, Homo sapiens
ataaatgagaactgt

SEQ ID NO: 1902519 - DNA, 15 bp, Homo sapiens
taaatgagaactgta

SEQ ID NO: 1902520 - DNA, 15 bp, Homo sapiens
aaatgagaactgtaa

SEQ ID NO: 1902521 - DNA, 15 bp, Homo sapiens
aatgagaactgtaac

SEQ ID NO: 1902522 - DNA, 15 bp, Homo sapiens
atgagaactgtaact

SEQ ID NO: 1902523 - DNA, 15 bp, Homo sapiens
tgagaactgtaactt

SEQ ID NO: 1902524 - DNA, 15 bp, Homo sapiens
gagaactgtaacttt

SEQ ID NO: 1902525 - DNA, 15 bp, Homo sapiens
agaactgtaactttg

SEQ ID NO: 1902526 - DNA, 15 bp, Homo sapiens
gaactgtaactttgg

SEQ ID NO: 1902527 - DNA, 15 bp, Homo sapiens
aactgtaactttgga

SEQ ID NO: 1902528 - DNA, 15 bp, Homo sapiens
actgtaactttggac

SEQ ID NO: 1902529 - DNA, 15 bp, Homo sapiens
ctgtaactttggaca

SEQ ID NO: 1902530 - DNA, 15 bp, Homo sapiens
tgtaactttggacag

SEQ ID NO: 1902531 - DNA, 15 bp, Homo sapiens
gtaactttggacaga

SEQ ID NO: 1902532 - DNA, 15 bp, Homo sapiens
taactttggacagac

SEQ ID NO: 1902533 - DNA, 15 bp, Homo sapiens
aactttggacagact

SEQ ID NO: 1902534 - DNA, 15 bp, Homo sapiens
actttggacagactt

SEQ ID NO: 1902535 - DNA, 15 bp, Homo sapiens
ctttggacagacttt

SEQ ID NO: 1902536 - DNA, 15 bp, Homo sapiens
tttggacagactttt

SEQ ID NO: 1902537 - DNA, 15 bp, Homo sapiens
ttggacagacttttt

SEQ ID NO: 1902538 - DNA, 15 bp, Homo sapiens
tggacagactttttc

SEQ ID NO: 1902539 - DNA, 15 bp, Homo sapiens
ggacagactttttca

SEQ ID NO: 1902540 - DNA, 15 bp, Homo sapiens
gacagactttttcag

SEQ ID NO: 1902541 - DNA, 15 bp, Homo sapiens
acagactttttcagt

SEQ ID NO: 1902542 - DNA, 15 bp, Homo sapiens
cagactttttcagtc

SEQ ID NO: 1902543 - DNA, 15 bp, Homo sapiens
agactttttcagtca

SEQ ID NO: 1902544 - DNA, 15 bp, Homo sapiens
gactttttcagtcat

SEQ ID NO: 1902545 - DNA, 15 bp, Homo sapiens
actttttcagtcatc

SEQ ID NO: 1902546 - DNA, 15 bp, Homo sapiens
ctttttcagtcatct

SEQ ID NO: 1902547 - DNA, 15 bp, Homo sapiens
tttttcagtcatctt

SEQ ID NO: 1902548 - DNA, 15 bp, Homo sapiens
ttttcagtcatcttt

SEQ ID NO: 1902549 - DNA, 15 bp, Homo sapiens
tttcagtcatcttta

SEQ ID NO: 1902550 - DNA, 15 bp, Homo sapiens
ttcagtcatctttac

SEQ ID NO: 1902551 - DNA, 15 bp, Homo sapiens
tcagtcatctttacg

SEQ ID NO: 1902552 - DNA, 15 bp, Homo sapiens
cagtcatctttacgg

SEQ ID NO: 1902553 - DNA, 15 bp, Homo sapiens
agtcatctttacggt

SEQ ID NO: 1902554 - DNA, 15 bp, Homo sapiens
gtcatctttacggta

SEQ ID NO: 1902555 - DNA, 15 bp, Homo sapiens
tcatctttacggtaa

SEQ ID NO: 1902556 - DNA, 15 bp, Homo sapiens
catctttacggtaat

SEQ ID NO: 1902557 - DNA, 15 bp, Homo sapiens
atctttacggtaata

SEQ ID NO: 1902558 - DNA, 15 bp, Homo sapiens
tctttacggtaataa

SEQ ID NO: 1902559 - DNA, 15 bp, Homo sapiens
ctttacggtaataag

SEQ ID NO: 1902560 - DNA, 15 bp, Homo sapiens
tttacggtaataagt

SEQ ID NO: 1902561 - DNA, 15 bp, Homo sapiens
ttacggtaataagtt

SEQ ID NO: 1902562 - DNA, 15 bp, Homo sapiens
tacggtaataagttc

SEQ ID NO: 1902563 - DNA, 15 bp, Homo sapiens
acggtaataagttcc

SEQ ID NO: 1902564 - DNA, 15 bp, Homo sapiens
cggtaataagttccc

SEQ ID NO: 1902565 - DNA, 15 bp, Homo sapiens
ggtaataagttccca

SEQ ID NO: 1902566 - DNA, 15 bp, Homo sapiens
gtaataagttcccaa

SEQ ID NO: 1902567 - DNA, 15 bp, Homo sapiens
taataagttcccaat

SEQ ID NO: 1902568 - DNA, 15 bp, Homo sapiens
aataagttcccaatt

SEQ ID NO: 1902569 - DNA, 15 bp, Homo sapiens
ataagttcccaatta

SEQ ID NO: 1902570 - DNA, 15 bp, Homo sapiens
taagttcccaattag

SEQ ID NO: 1902571 - DNA, 15 bp, Homo sapiens
aagttcccaattaga

SEQ ID NO: 1902572 - DNA, 15 bp, Homo sapiens
agttcccaattagac

SEQ ID NO: 1902573 - DNA, 15 bp, Homo sapiens
gttcccaattagaca

SEQ ID NO: 1902574 - DNA, 15 bp, Homo sapiens
ttcccaattagacaa

SEQ ID NO: 1902575 - DNA, 15 bp, Homo sapiens
tcccaattagacaat

SEQ ID NO: 1902576 - DNA, 15 bp, Homo sapiens
cccaattagacaata

SEQ ID NO: 1902577 - DNA, 15 bp, Homo sapiens
ccaattagacaatag

SEQ ID NO: 1902578 - DNA, 15 bp, Homo sapiens
caattagacaatagt

SEQ ID NO: 1902579 - DNA, 15 bp, Homo sapiens
aattagacaatagtt

SEQ ID NO: 1902580 - DNA, 15 bp, Homo sapiens
attagacaatagtta

SEQ ID NO: 1902581 - DNA, 15 bp, Homo sapiens
ttagacaatagttat

SEQ ID NO: 1902582 - DNA, 15 bp, Homo sapiens
tagacaatagttatt

SEQ ID NO: 1902583 - DNA, 15 bp, Homo sapiens
agacaatagttattt

SEQ ID NO: 1902584 - DNA, 15 bp, Homo sapiens
gacaatagttatttg

SEQ ID NO: 1902585 - DNA, 15 bp, Homo sapiens
acaatagttatttgt

SEQ ID NO: 1902586 - DNA, 15 bp, Homo sapiens
caatagttatttgtt

SEQ ID NO: 1902587 - DNA, 15 bp, Homo sapiens
aatagttatttgttt

SEQ ID NO: 1902588 - DNA, 15 bp, Homo sapiens
atagttatttgtttt

SEQ ID NO: 1902589 - DNA, 15 bp, Homo sapiens
tagttatttgtttta

SEQ ID NO: 1902590 - DNA, 15 bp, Homo sapiens
agttatttgttttat

SEQ ID NO: 1902591 - DNA, 15 bp, Homo sapiens
gttatttgttttatg

SEQ ID NO: 1902592 - DNA, 15 bp, Homo sapiens
ttatttgttttatga

SEQ ID NO: 1902593 - DNA, 15 bp, Homo sapiens
tatttgttttatgac

SEQ ID NO: 1902594 - DNA, 15 bp, Homo sapiens
tttgttttatgactt

SEQ ID NO: 1902595 - DNA, 15 bp, Homo sapiens
ttgttttatgacttg

SEQ ID NO: 1902596 - DNA, 15 bp, Homo sapiens
tgttttatgacttgc

SEQ ID NO: 1902597 - DNA, 15 bp, Homo sapiens
gttttatgacttgct

SEQ ID NO: 1902598 - DNA, 15 bp, Homo sapiens
ttttatgacttgctg

SEQ ID NO: 1902599 - DNA, 15 bp, Homo sapiens
tttatgacttgctgt

SEQ ID NO: 1902600 - DNA, 15 bp, Homo sapiens
ttatgacttgctgtt

SEQ ID NO: 1902601 - DNA, 15 bp, Homo sapiens
tatgacttgctgttg

SEQ ID NO: 1902602 - DNA, 15 bp, Homo sapiens
atgacttgctgttgg

SEQ ID NO: 1902603 - DNA, 15 bp, Homo sapiens
tgacttgctgttggt

SEQ ID NO: 1902604 - DNA, 15 bp, Homo sapiens
gacttgctgttggta

SEQ ID NO: 1902605 - DNA, 15 bp, Homo sapiens
acttgctgttggtag

SEQ ID NO: 1902606 - DNA, 15 bp, Homo sapiens
cttgctgttggtagg

SEQ ID NO: 1902607 - DNA, 15 bp, Homo sapiens
ttgctgttggtaggt

SEQ ID NO: 1902608 - DNA, 15 bp, Homo sapiens
tgctgttggtaggtt

SEQ ID NO: 1902609 - DNA, 15 bp, Homo sapiens
gctgttggtaggtta

SEQ ID NO: 1902610 - DNA, 15 bp, Homo sapiens
ctgttggtaggttat

SEQ ID NO: 1902611 - DNA, 15 bp, Homo sapiens
tgttggtaggttatc

SEQ ID NO: 1902612 - DNA, 15 bp, Homo sapiens
gttggtaggttatcc

SEQ ID NO: 1902613 - DNA, 15 bp, Homo sapiens
ttggtaggttatccc

SEQ ID NO: 1902614 - DNA, 15 bp, Homo sapiens
tggtaggttatcccc

SEQ ID NO: 1902615 - DNA, 15 bp, Homo sapiens
ggtaggttatcccca

SEQ ID NO: 1902616 - DNA, 15 bp, Homo sapiens
gtaggttatccccaa

SEQ ID NO: 1902617 - DNA, 15 bp, Homo sapiens
taggttatccccaag

SEQ ID NO: 1902618 - DNA, 15 bp, Homo sapiens
aggttatccccaagg

SEQ ID NO: 1902619 - DNA, 15 bp, Homo sapiens
ggttatccccaaggg

SEQ ID NO: 1902620 - DNA, 15 bp, Homo sapiens
gttatccccaaggga

SEQ ID NO: 1902621 - DNA, 15 bp, Homo sapiens
ttatccccaagggac

SEQ ID NO: 1902622 - DNA, 15 bp, Homo sapiens
tatccccaagggact

SEQ ID NO: 1902623 - DNA, 15 bp, Homo sapiens
atccccaagggactg

SEQ ID NO: 1902624 - DNA, 15 bp, Homo sapiens
tccccaagggactga

SEQ ID NO: 1902625 - DNA, 15 bp, Homo sapiens
ccccaagggactgag

SEQ ID NO: 1902626 - DNA, 15 bp, Homo sapiens
cccaagggactgaga

SEQ ID NO: 1902627 - DNA, 15 bp, Homo sapiens
ccaagggactgagaa

SEQ ID NO: 1902628 - DNA, 15 bp, Homo sapiens
caagggactgagaaa

SEQ ID NO: 1902629 - DNA, 15 bp, Homo sapiens
aagggactgagaaat

SEQ ID NO: 1902630 - DNA, 15 bp, Homo sapiens
agggactgagaaatt

SEQ ID NO: 1902631 - DNA, 15 bp, Homo sapiens
gggactgagaaattc

SEQ ID NO: 1902632 - DNA, 15 bp, Homo sapiens
ggactgagaaattcc

SEQ ID NO: 1902633 - DNA, 15 bp, Homo sapiens
gactgagaaattcct

SEQ ID NO: 1902634 - DNA, 15 bp, Homo sapiens
actgagaaattcctg

SEQ ID NO: 1902635 - DNA, 15 bp, Homo sapiens
ctgagaaattcctgt

SEQ ID NO: 1902636 - DNA, 15 bp, Homo sapiens
tgagaaattcctgtt

SEQ ID NO: 1902637 - DNA, 15 bp, Homo sapiens
gagaaattcctgttt

SEQ ID NO: 1902638 - DNA, 15 bp, Homo sapiens
agaaattcctgtttt

SEQ ID NO: 1902639 - DNA, 15 bp, Homo sapiens
gaaattcctgttttg

SEQ ID NO: 1902640 - DNA, 15 bp, Homo sapiens
aaattcctgttttga

SEQ ID NO: 1902641 - DNA, 15 bp, Homo sapiens
aattcctgttttgaa

SEQ ID NO: 1902642 - DNA, 15 bp, Homo sapiens
attcctgttttgaaa

SEQ ID NO: 1902643 - DNA, 15 bp, Homo sapiens
ttcctgttttgaaaa

SEQ ID NO: 1902644 - DNA, 15 bp, Homo sapiens
tcctgttttgaaaag

SEQ ID NO: 1902645 - DNA, 15 bp, Homo sapiens
cctgttttgaaaagt

SEQ ID NO: 1902646 - DNA, 15 bp, Homo sapiens
ctgttttgaaaagtc

SEQ ID NO: 1902647 - DNA, 15 bp, Homo sapiens
tgttttgaaaagtcc

SEQ ID NO: 1902648 - DNA, 15 bp, Homo sapiens
gttttgaaaagtcca

SEQ ID NO: 1902649 - DNA, 15 bp, Homo sapiens
ttttgaaaagtccaa

SEQ ID NO: 1902650 - DNA, 15 bp, Homo sapiens
tttgaaaagtccaaa

SEQ ID NO: 1902651 - DNA, 15 bp, Homo sapiens
ttgaaaagtccaaaa

SEQ ID NO: 1902652 - DNA, 15 bp, Homo sapiens
tgaaaagtccaaaaa

SEQ ID NO: 1902653 - DNA, 15 bp, Homo sapiens
gaaaagtccaaaaag

SEQ ID NO: 1902654 - DNA, 15 bp, Homo sapiens
aaaagtccaaaaagt

SEQ ID NO: 1902655 - DNA, 15 bp, Homo sapiens
aaagtccaaaaagtc

SEQ ID NO: 1902656 - DNA, 15 bp, Homo sapiens
aagtccaaaaagtct

SEQ ID NO: 1902657 - DNA, 15 bp, Homo sapiens
agtccaaaaagtctt

SEQ ID NO: 1902658 - DNA, 15 bp, Homo sapiens
gtccaaaaagtcttt

SEQ ID NO: 1902659 - DNA, 15 bp, Homo sapiens
tccaaaaagtctttg

SEQ ID NO: 1902660 - DNA, 15 bp, Homo sapiens
ccaaaaagtctttga

SEQ ID NO: 1902661 - DNA, 15 bp, Homo sapiens
caaaaagtctttgat

SEQ ID NO: 1902662 - DNA, 15 bp, Homo sapiens
aaaaagtctttgatg

SEQ ID NO: 1902663 - DNA, 15 bp, Homo sapiens
aaaagtctttgatga

SEQ ID NO: 1902664 - DNA, 15 bp, Homo sapiens
aaagtctttgatgac

SEQ ID NO: 1902665 - DNA, 15 bp, Homo sapiens
aagtctttgatgact

SEQ ID NO: 1902666 - DNA, 15 bp, Homo sapiens
agtctttgatgactt

SEQ ID NO: 1902667 - DNA, 15 bp, Homo sapiens
gtctttgatgacttg

SEQ ID NO: 1902668 - DNA, 15 bp, Homo sapiens
tctttgatgacttgc

SEQ ID NO: 1902669 - DNA, 15 bp, Homo sapiens
ctttgatgacttgct

SEQ ID NO: 1902670 - DNA, 15 bp, Homo sapiens
tttgatgacttgctg

SEQ ID NO: 1902671 - DNA, 15 bp, Homo sapiens
ttgatgacttgctgt

SEQ ID NO: 1902672 - DNA, 15 bp, Homo sapiens
tgatgacttgctgtt

SEQ ID NO: 1902673 - DNA, 15 bp, Homo sapiens
gatgacttgctgttt

SEQ ID NO: 1902674 - DNA, 15 bp, Homo sapiens
atgacttgctgtttc

SEQ ID NO: 1902675 - DNA, 15 bp, Homo sapiens
tgacttgctgtttca

SEQ ID NO: 1902676 - DNA, 15 bp, Homo sapiens
gacttgctgtttcat

SEQ ID NO: 1902677 - DNA, 15 bp, Homo sapiens
acttgctgtttcatt

SEQ ID NO: 1902678 - DNA, 15 bp, Homo sapiens
cttgctgtttcattt

SEQ ID NO: 1902679 - DNA, 15 bp, Homo sapiens
ttgctgtttcatttt

SEQ ID NO: 1902680 - DNA, 15 bp, Homo sapiens
tgctgtttcattttt

SEQ ID NO: 1902681 - DNA, 15 bp, Homo sapiens
gctgtttcatttttt

SEQ ID NO: 1902682 - DNA, 15 bp, Homo sapiens
ctgtttcattttttt

SEQ ID NO: 1902683 - DNA, 15 bp, Homo sapiens
tgtttcatttttttc

SEQ ID NO: 1902684 - DNA, 15 bp, Homo sapiens
gtttcatttttttct

SEQ ID NO: 1902685 - DNA, 15 bp, Homo sapiens
tttcatttttttctt

SEQ ID NO: 1902686 - DNA, 15 bp, Homo sapiens
ttcatttttttcttt

SEQ ID NO: 1902687 - DNA, 15 bp, Homo sapiens
tcatttttttctttt

SEQ ID NO: 1902688 - DNA, 15 bp, Homo sapiens
catttttttcttttc

SEQ ID NO: 1902689 - DNA, 15 bp, Homo sapiens
atttttttcttttct

SEQ ID NO: 1902690 - DNA, 15 bp, Homo sapiens
tttttttcttttctc

SEQ ID NO: 1902691 - DNA, 15 bp, Homo sapiens
ttttttcttttctct

SEQ ID NO: 1902692 - DNA, 15 bp, Homo sapiens
tttttcttttctctt

SEQ ID NO: 1902693 - DNA, 15 bp, Homo sapiens
ttttcttttctcttc

SEQ ID NO: 1902694 - DNA, 15 bp, Homo sapiens
tttcttttctcttca

SEQ ID NO: 1902695 - DNA, 15 bp, Homo sapiens
ttcttttctcttcag

SEQ ID NO: 1902696 - DNA, 15 bp, Homo sapiens
tcttttctcttcagt

SEQ ID NO: 1902697 - DNA, 15 bp, Homo sapiens
cttttctcttcagtt

SEQ ID NO: 1902698 - DNA, 15 bp, Homo sapiens
ttttctcttcagtta

SEQ ID NO: 1902699 - DNA, 15 bp, Homo sapiens
tttctcttcagttat

SEQ ID NO: 1902700 - DNA, 15 bp, Homo sapiens
ttctcttcagttata

SEQ ID NO: 1902701 - DNA, 15 bp, Homo sapiens
tctcttcagttatag

SEQ ID NO: 1902702 - DNA, 15 bp, Homo sapiens
ctcttcagttataga

SEQ ID NO: 1902703 - DNA, 15 bp, Homo sapiens
tcttcagttatagaa

SEQ ID NO: 1902704 - DNA, 15 bp, Homo sapiens
cttcagttatagaaa

SEQ ID NO: 1902705 - DNA, 15 bp, Homo sapiens
ttcagttatagaaaa

SEQ ID NO: 1902706 - DNA, 15 bp, Homo sapiens
tcagttatagaaaac

SEQ ID NO: 1902707 - DNA, 15 bp, Homo sapiens
cagttatagaaaaca

SEQ ID NO: 1902708 - DNA, 15 bp, Homo sapiens
agttatagaaaacag

SEQ ID NO: 1902709 - DNA, 15 bp, Homo sapiens
gttatagaaaacagg

SEQ ID NO: 1902710 - DNA, 15 bp, Homo sapiens
ttatagaaaacagga

SEQ ID NO: 1902711 - DNA, 15 bp, Homo sapiens
tatagaaaacaggat

SEQ ID NO: 1902712 - DNA, 15 bp, Homo sapiens
atagaaaacaggatt

SEQ ID NO: 1902713 - DNA, 15 bp, Homo sapiens
tagaaaacaggatta

SEQ ID NO: 1902714 - DNA, 15 bp, Homo sapiens
agaaaacaggattac

SEQ ID NO: 1902715 - DNA, 15 bp, Homo sapiens
gaaaacaggattaca

SEQ ID NO: 1902716 - DNA, 15 bp, Homo sapiens
aaaacaggattacac

SEQ ID NO: 1902717 - DNA, 15 bp, Homo sapiens
aaacaggattacacc

SEQ ID NO: 1902718 - DNA, 15 bp, Homo sapiens
aacaggattacaccc

SEQ ID NO: 1902719 - DNA, 15 bp, Homo sapiens
acaggattacaccca

SEQ ID NO: 1902720 - DNA, 15 bp, Homo sapiens
caggattacacccac

SEQ ID NO: 1902721 - DNA, 15 bp, Homo sapiens
aggattacacccacc

SEQ ID NO: 1902722 - DNA, 15 bp, Homo sapiens
ggattacacccacct

SEQ ID NO: 1902723 - DNA, 15 bp, Homo sapiens
gattacacccacctt

SEQ ID NO: 1902724 - DNA, 15 bp, Homo sapiens
attacacccaccttg

SEQ ID NO: 1902725 - DNA, 15 bp, Homo sapiens
ttacacccaccttgc

SEQ ID NO: 1902726 - DNA, 15 bp, Homo sapiens
tacacccaccttgcc

SEQ ID NO: 1902727 - DNA, 15 bp, Homo sapiens
acacccaccttgcct

SEQ ID NO: 1902728 - DNA, 15 bp, Homo sapiens
cacccaccttgcctt

SEQ ID NO: 1902729 - DNA, 15 bp, Homo sapiens
acccaccttgccttt

SEQ ID NO: 1902730 - DNA, 15 bp, Homo sapiens
cccaccttgcctttg

SEQ ID NO: 1902731 - DNA, 15 bp, Homo sapiens
ccaccttgcctttgt

SEQ ID NO: 1902732 - DNA, 15 bp, Homo sapiens
caccttgcctttgta

SEQ ID NO: 1902733 - DNA, 15 bp, Homo sapiens
accttgcctttgtac

SEQ ID NO: 1902734 - DNA, 15 bp, Homo sapiens
cttgcctttgtacag

SEQ ID NO: 1902735 - DNA, 15 bp, Homo sapiens
ttgcctttgtacagt

SEQ ID NO: 1902736 - DNA, 15 bp, Homo sapiens
tgcctttgtacagtg

SEQ ID NO: 1902737 - DNA, 15 bp, Homo sapiens
gcctttgtacagtgc

SEQ ID NO: 1902738 - DNA, 15 bp, Homo sapiens
cctttgtacagtgca

SEQ ID NO: 1902739 - DNA, 15 bp, Homo sapiens
ctttgtacagtgcat

SEQ ID NO: 1902740 - DNA, 15 bp, Homo sapiens
tttgtacagtgcatc

SEQ ID NO: 1902741 - DNA, 15 bp, Homo sapiens
ttgtacagtgcatct

SEQ ID NO: 1902742 - DNA, 15 bp, Homo sapiens
tgtacagtgcatcta

SEQ ID NO: 1902743 - DNA, 15 bp, Homo sapiens
gtacagtgcatctac

SEQ ID NO: 1902744 - DNA, 15 bp, Homo sapiens
tacagtgcatctact

SEQ ID NO: 1902745 - DNA, 15 bp, Homo sapiens
acagtgcatctacta

SEQ ID NO: 1902746 - DNA, 15 bp, Homo sapiens
cagtgcatctactat

SEQ ID NO: 1902747 - DNA, 15 bp, Homo sapiens
agtgcatctactatc

SEQ ID NO: 1902748 - DNA, 15 bp, Homo sapiens
gtgcatctactatct

SEQ ID NO: 1902749 - DNA, 15 bp, Homo sapiens
tgcatctactatctg

SEQ ID NO: 1902750 - DNA, 15 bp, Homo sapiens
gcatctactatctgc

SEQ ID NO: 1902751 - DNA, 15 bp, Homo sapiens
catctactatctgct

SEQ ID NO: 1902752 - DNA, 15 bp, Homo sapiens
atctactatctgctg

SEQ ID NO: 1902753 - DNA, 15 bp, Homo sapiens
tctactatctgctga

SEQ ID NO: 1902754 - DNA, 15 bp, Homo sapiens
ctactatctgctgac

SEQ ID NO: 1902755 - DNA, 15 bp, Homo sapiens
tactatctgctgact

SEQ ID NO: 1902756 - DNA, 15 bp, Homo sapiens
actatctgctgactt

SEQ ID NO: 1902757 - DNA, 15 bp, Homo sapiens
ctatctgctgactta

SEQ ID NO: 1902758 - DNA, 15 bp, Homo sapiens
tatctgctgacttaa

SEQ ID NO: 1902759 - DNA, 15 bp, Homo sapiens
atctgctgacttaac

SEQ ID NO: 1902760 - DNA, 15 bp, Homo sapiens
tctgctgacttaacc

SEQ ID NO: 1902761 - DNA, 15 bp, Homo sapiens
ctgctgacttaacct

SEQ ID NO: 1902762 - DNA, 15 bp, Homo sapiens
tgctgacttaacctg

SEQ ID NO: 1902763 - DNA, 15 bp, Homo sapiens
gctgacttaacctga

SEQ ID NO: 1902764 - DNA, 15 bp, Homo sapiens
ctgacttaacctgag

SEQ ID NO: 1902765 - DNA, 15 bp, Homo sapiens
tgacttaacctgagt

SEQ ID NO: 1902766 - DNA, 15 bp, Homo sapiens
gacttaacctgagta

SEQ ID NO: 1902767 - DNA, 15 bp, Homo sapiens
acttaacctgagtaa

SEQ ID NO: 1902768 - DNA, 15 bp, Homo sapiens
cttaacctgagtaaa

SEQ ID NO: 1902769 - DNA, 15 bp, Homo sapiens
ttaacctgagtaaat

SEQ ID NO: 1902770 - DNA, 15 bp, Homo sapiens
taacctgagtaaatg

SEQ ID NO: 1902771 - DNA, 15 bp, Homo sapiens
aacctgagtaaatgc

SEQ ID NO: 1902772 - DNA, 15 bp, Homo sapiens
acctgagtaaatgct

SEQ ID NO: 1902773 - DNA, 15 bp, Homo sapiens
cctgagtaaatgctt

SEQ ID NO: 1902774 - DNA, 15 bp, Homo sapiens
ctgagtaaatgcttt

SEQ ID NO: 1902775 - DNA, 15 bp, Homo sapiens
tgagtaaatgctttg

SEQ ID NO: 1902776 - DNA, 15 bp, Homo sapiens
gagtaaatgctttga

SEQ ID NO: 1902777 - DNA, 15 bp, Homo sapiens
agtaaatgctttgaa

SEQ ID NO: 1902778 - DNA, 15 bp, Homo sapiens
gtaaatgctttgaat

SEQ ID NO: 1902779 - DNA, 15 bp, Homo sapiens
taaatgctttgaatt

SEQ ID NO: 1902780 - DNA, 15 bp, Homo sapiens
aaatgctttgaattg

SEQ ID NO: 1902781 - DNA, 15 bp, Homo sapiens
aatgctttgaattga

SEQ ID NO: 1902782 - DNA, 15 bp, Homo sapiens
atgctttgaattgag

SEQ ID NO: 1902783 - DNA, 15 bp, Homo sapiens
tgctttgaattgagc

SEQ ID NO: 1902784 - DNA, 15 bp, Homo sapiens
gctttgaattgagcc

SEQ ID NO: 1902785 - DNA, 15 bp, Homo sapiens
ctttgaattgagccc

SEQ ID NO: 1902786 - DNA, 15 bp, Homo sapiens
tttgaattgagcccc

SEQ ID NO: 1902787 - DNA, 15 bp, Homo sapiens
ttgaattgagcccca

SEQ ID NO: 1902788 - DNA, 15 bp, Homo sapiens
tgaattgagccccat

SEQ ID NO: 1902789 - DNA, 15 bp, Homo sapiens
gaattgagccccata

SEQ ID NO: 1902790 - DNA, 15 bp, Homo sapiens
aattgagccccatat

SEQ ID NO: 1902791 - DNA, 15 bp, Homo sapiens
attgagccccatata

SEQ ID NO: 1902792 - DNA, 15 bp, Homo sapiens
ttgagccccatataa

SEQ ID NO: 1902793 - DNA, 15 bp, Homo sapiens
tgagccccatataat

SEQ ID NO: 1902794 - DNA, 15 bp, Homo sapiens
gagccccatataatg

SEQ ID NO: 1902795 - DNA, 15 bp, Homo sapiens
agccccatataatgt

SEQ ID NO: 1902796 - DNA, 15 bp, Homo sapiens
gccccatataatgtc

SEQ ID NO: 1902797 - DNA, 15 bp, Homo sapiens
ccccatataatgtcc

SEQ ID NO: 1902798 - DNA, 15 bp, Homo sapiens
cccatataatgtcct

SEQ ID NO: 1902799 - DNA, 15 bp, Homo sapiens
ccatataatgtccta

SEQ ID NO: 1902800 - DNA, 15 bp, Homo sapiens
catataatgtcctaa

SEQ ID NO: 1902801 - DNA, 15 bp, Homo sapiens
atataatgtcctaag

SEQ ID NO: 1902802 - DNA, 15 bp, Homo sapiens
tataatgtcctaagg

SEQ ID NO: 1902803 - DNA, 15 bp, Homo sapiens
ataatgtcctaaggc

SEQ ID NO: 1902804 - DNA, 15 bp, Homo sapiens
taatgtcctaaggca

SEQ ID NO: 1902805 - DNA, 15 bp, Homo sapiens
aatgtcctaaggcag

SEQ ID NO: 1902806 - DNA, 15 bp, Homo sapiens
atgtcctaaggcagc

SEQ ID NO: 1902807 - DNA, 15 bp, Homo sapiens
tgtcctaaggcagcc

SEQ ID NO: 1902808 - DNA, 15 bp, Homo sapiens
gtcctaaggcagcct

SEQ ID NO: 1902809 - DNA, 15 bp, Homo sapiens
tcctaaggcagccta

SEQ ID NO: 1902810 - DNA, 15 bp, Homo sapiens
cctaaggcagcctat

SEQ ID NO: 1902811 - DNA, 15 bp, Homo sapiens
ctaaggcagcctata

SEQ ID NO: 1902812 - DNA, 15 bp, Homo sapiens
taaggcagcctatat

SEQ ID NO: 1902813 - DNA, 15 bp, Homo sapiens
aaggcagcctatatg

SEQ ID NO: 1902814 - DNA, 15 bp, Homo sapiens
aggcagcctatatgg

SEQ ID NO: 1902815 - DNA, 15 bp, Homo sapiens
ggcagcctatatgga

SEQ ID NO: 1902816 - DNA, 15 bp, Homo sapiens
gcagcctatatggag

SEQ ID NO: 1902817 - DNA, 15 bp, Homo sapiens
cagcctatatggagt

SEQ ID NO: 1902818 - DNA, 15 bp, Homo sapiens
agcctatatggagta

SEQ ID NO: 1902819 - DNA, 15 bp, Homo sapiens
gcctatatggagtaa

SEQ ID NO: 1902820 - DNA, 15 bp, Homo sapiens
cctatatggagtaat

SEQ ID NO: 1902821 - DNA, 15 bp, Homo sapiens
ctatatggagtaatg

SEQ ID NO: 1902822 - DNA, 15 bp, Homo sapiens
tatatggagtaatga

SEQ ID NO: 1902823 - DNA, 15 bp, Homo sapiens
atatggagtaatgaa

SEQ ID NO: 1902824 - DNA, 15 bp, Homo sapiens
tatggagtaatgaat

SEQ ID NO: 1902825 - DNA, 15 bp, Homo sapiens
atggagtaatgaatt

SEQ ID NO: 1902826 - DNA, 15 bp, Homo sapiens
tggagtaatgaattg

SEQ ID NO: 1902827 - DNA, 15 bp, Homo sapiens
ggagtaatgaattgt

SEQ ID NO: 1902828 - DNA, 15 bp, Homo sapiens
gagtaatgaattgtc

SEQ ID NO: 1902829 - DNA, 15 bp, Homo sapiens
agtaatgaattgtct

SEQ ID NO: 1902830 - DNA, 15 bp, Homo sapiens
gtaatgaattgtctt

SEQ ID NO: 1902831 - DNA, 15 bp, Homo sapiens
taatgaattgtcttc

SEQ ID NO: 1902832 - DNA, 15 bp, Homo sapiens
aatgaattgtcttct

SEQ ID NO: 1902833 - DNA, 15 bp, Homo sapiens
atgaattgtcttctc

SEQ ID NO: 1902834 - DNA, 15 bp, Homo sapiens
tgaattgtcttctct

SEQ ID NO: 1902835 - DNA, 15 bp, Homo sapiens
gaattgtcttctctc

SEQ ID NO: 1902836 - DNA, 15 bp, Homo sapiens
aattgtcttctctct

SEQ ID NO: 1902837 - DNA, 15 bp, Homo sapiens
attgtcttctctctt

SEQ ID NO: 1902838 - DNA, 15 bp, Homo sapiens
ttgtcttctctctta

SEQ ID NO: 1902839 - DNA, 15 bp, Homo sapiens
tgtcttctctcttat

SEQ ID NO: 1902840 - DNA, 15 bp, Homo sapiens
gtcttctctcttatg

SEQ ID NO: 1902841 - DNA, 15 bp, Homo sapiens
tcttctctcttatgc

SEQ ID NO: 1902842 - DNA, 15 bp, Homo sapiens
cttctctcttatgca

SEQ ID NO: 1902843 - DNA, 15 bp, Homo sapiens
ttctctcttatgcac

SEQ ID NO: 1902844 - DNA, 15 bp, Homo sapiens
tctctcttatgcacc

SEQ ID NO: 1902845 - DNA, 15 bp, Homo sapiens
ctctcttatgcaccc

SEQ ID NO: 1902846 - DNA, 15 bp, Homo sapiens
tctcttatgcaccca

SEQ ID NO: 1902847 - DNA, 15 bp, Homo sapiens
ctcttatgcacccag

SEQ ID NO: 1902848 - DNA, 15 bp, Homo sapiens
tcttatgcacccaga

SEQ ID NO: 1902849 - DNA, 15 bp, Homo sapiens
cttatgcacccagag

SEQ ID NO: 1902850 - DNA, 15 bp, Homo sapiens
ttatgcacccagagt

SEQ ID NO: 1902851 - DNA, 15 bp, Homo sapiens
tatgcacccagagtg

SEQ ID NO: 1902852 - DNA, 15 bp, Homo sapiens
atgcacccagagtgg

SEQ ID NO: 1902853 - DNA, 15 bp, Homo sapiens
tgcacccagagtggt

SEQ ID NO: 1902854 - DNA, 15 bp, Homo sapiens
gcacccagagtggta

SEQ ID NO: 1902855 - DNA, 15 bp, Homo sapiens
cacccagagtggtag

SEQ ID NO: 1902856 - DNA, 15 bp, Homo sapiens
acccagagtggtagt

SEQ ID NO: 1902857 - DNA, 15 bp, Homo sapiens
cccagagtggtagtt

SEQ ID NO: 1902858 - DNA, 15 bp, Homo sapiens
ccagagtggtagttg

SEQ ID NO: 1902859 - DNA, 15 bp, Homo sapiens
cagagtggtagttgg

SEQ ID NO: 1902860 - DNA, 15 bp, Homo sapiens
agagtggtagttggc

SEQ ID NO: 1902861 - DNA, 15 bp, Homo sapiens
gagtggtagttggca

SEQ ID NO: 1902862 - DNA, 15 bp, Homo sapiens
agtggtagttggcac

SEQ ID NO: 1902863 - DNA, 15 bp, Homo sapiens
gtggtagttggcact

SEQ ID NO: 1902864 - DNA, 15 bp, Homo sapiens
tggtagttggcactc

SEQ ID NO: 1902865 - DNA, 15 bp, Homo sapiens
ggtagttggcactca

SEQ ID NO: 1902866 - DNA, 15 bp, Homo sapiens
gtagttggcactcaa

SEQ ID NO: 1902867 - DNA, 15 bp, Homo sapiens
tagttggcactcaag

SEQ ID NO: 1902868 - DNA, 15 bp, Homo sapiens
agttggcactcaagt

SEQ ID NO: 1902869 - DNA, 15 bp, Homo sapiens
gttggcactcaagtt

SEQ ID NO: 1902870 - DNA, 15 bp, Homo sapiens
ttggcactcaagttg

SEQ ID NO: 1902871 - DNA, 15 bp, Homo sapiens
tggcactcaagttgt

SEQ ID NO: 1902872 - DNA, 15 bp, Homo sapiens
ggcactcaagttgtt

SEQ ID NO: 1902873 - DNA, 15 bp, Homo sapiens
gcactcaagttgttc

SEQ ID NO: 1902874 - DNA, 15 bp, Homo sapiens
cactcaagttgttcc

SEQ ID NO: 1902875 - DNA, 15 bp, Homo sapiens
actcaagttgttcct

SEQ ID NO: 1902876 - DNA, 15 bp, Homo sapiens
ctcaagttgttcctc

SEQ ID NO: 1902877 - DNA, 15 bp, Homo sapiens
tcaagttgttcctca

SEQ ID NO: 1902878 - DNA, 15 bp, Homo sapiens
caagttgttcctcag

SEQ ID NO: 1902879 - DNA, 15 bp, Homo sapiens
aagttgttcctcaga

SEQ ID NO: 1902880 - DNA, 15 bp, Homo sapiens
agttgttcctcagat

SEQ ID NO: 1902881 - DNA, 15 bp, Homo sapiens
gttgttcctcagata

SEQ ID NO: 1902882 - DNA, 15 bp, Homo sapiens
ttgttcctcagataa

SEQ ID NO: 1902883 - DNA, 15 bp, Homo sapiens
tgttcctcagataac

SEQ ID NO: 1902884 - DNA, 15 bp, Homo sapiens
gttcctcagataact

SEQ ID NO: 1902885 - DNA, 15 bp, Homo sapiens
ttcctcagataactt

SEQ ID NO: 1902886 - DNA, 15 bp, Homo sapiens
tcctcagataacttt

SEQ ID NO: 1902887 - DNA, 15 bp, Homo sapiens
cctcagataactttg

SEQ ID NO: 1902888 - DNA, 15 bp, Homo sapiens
ctcagataactttgt

SEQ ID NO: 1902889 - DNA, 15 bp, Homo sapiens
tcagataactttgtg

SEQ ID NO: 1902890 - DNA, 15 bp, Homo sapiens
cagataactttgtgt

SEQ ID NO: 1902891 - DNA, 15 bp, Homo sapiens
agataactttgtgtg

SEQ ID NO: 1902892 - DNA, 15 bp, Homo sapiens
gataactttgtgtgt

SEQ ID NO: 1902893 - DNA, 15 bp, Homo sapiens
ataactttgtgtgtt

SEQ ID NO: 1902894 - DNA, 15 bp, Homo sapiens
taactttgtgtgttc

SEQ ID NO: 1902895 - DNA, 15 bp, Homo sapiens
aactttgtgtgttct

SEQ ID NO: 1902896 - DNA, 15 bp, Homo sapiens
actttgtgtgttctg

SEQ ID NO: 1902897 - DNA, 15 bp, Homo sapiens
ctttgtgtgttctgg

SEQ ID NO: 1902898 - DNA, 15 bp, Homo sapiens
tttgtgtgttctggg

SEQ ID NO: 1902899 - DNA, 15 bp, Homo sapiens
ttgtgtgttctgggg

SEQ ID NO: 1902900 - DNA, 15 bp, Homo sapiens
tgtgtgttctggggc

SEQ ID NO: 1902901 - DNA, 15 bp, Homo sapiens
gtgtgttctggggct

SEQ ID NO: 1902902 - DNA, 15 bp, Homo sapiens
tgtgttctggggctc

SEQ ID NO: 1902903 - DNA, 15 bp, Homo sapiens
gtgttctggggctca

SEQ ID NO: 1902904 - DNA, 15 bp, Homo sapiens
tgttctggggctcaa

SEQ ID NO: 1902905 - DNA, 15 bp, Homo sapiens
gttctggggctcaat

SEQ ID NO: 1902906 - DNA, 15 bp, Homo sapiens
ttctggggctcaatg

SEQ ID NO: 1902907 - DNA, 15 bp, Homo sapiens
tctggggctcaatga

SEQ ID NO: 1902908 - DNA, 15 bp, Homo sapiens
ctggggctcaatgaa

SEQ ID NO: 1902909 - DNA, 15 bp, Homo sapiens
tggggctcaatgaag

SEQ ID NO: 1902910 - DNA, 15 bp, Homo sapiens
ggggctcaatgaagt

SEQ ID NO: 1902911 - DNA, 15 bp, Homo sapiens
gggctcaatgaagta

SEQ ID NO: 1902912 - DNA, 15 bp, Homo sapiens
ggctcaatgaagtag

SEQ ID NO: 1902913 - DNA, 15 bp, Homo sapiens
gctcaatgaagtagt

SEQ ID NO: 1902914 - DNA, 15 bp, Homo sapiens
ctcaatgaagtagtt

SEQ ID NO: 1902915 - DNA, 15 bp, Homo sapiens
tcaatgaagtagtta

SEQ ID NO: 1902916 - DNA, 15 bp, Homo sapiens
caatgaagtagttat

SEQ ID NO: 1902917 - DNA, 15 bp, Homo sapiens
aatgaagtagttatt

SEQ ID NO: 1902918 - DNA, 15 bp, Homo sapiens
atgaagtagttatta

SEQ ID NO: 1902919 - DNA, 15 bp, Homo sapiens
tgaagtagttattaa

SEQ ID NO: 1902920 - DNA, 15 bp, Homo sapiens
gaagtagttattaag

SEQ ID NO: 1902921 - DNA, 15 bp, Homo sapiens
aagtagttattaagt

SEQ ID NO: 1902922 - DNA, 15 bp, Homo sapiens
agtagttattaagtc

SEQ ID NO: 1902923 - DNA, 15 bp, Homo sapiens
gtagttattaagtca

SEQ ID NO: 1902924 - DNA, 15 bp, Homo sapiens
tagttattaagtcac

SEQ ID NO: 1902925 - DNA, 15 bp, Homo sapiens
agttattaagtcaca

SEQ ID NO: 1902926 - DNA, 15 bp, Homo sapiens
gttattaagtcacag

SEQ ID NO: 1902927 - DNA, 15 bp, Homo sapiens
ttattaagtcacagg

SEQ ID NO: 1902928 - DNA, 15 bp, Homo sapiens
tattaagtcacaggc

SEQ ID NO: 1902929 - DNA, 15 bp, Homo sapiens
attaagtcacaggct

SEQ ID NO: 1902930 - DNA, 15 bp, Homo sapiens
ttaagtcacaggctt

SEQ ID NO: 1902931 - DNA, 15 bp, Homo sapiens
taagtcacaggcttg

SEQ ID NO: 1902932 - DNA, 15 bp, Homo sapiens
aagtcacaggcttgg

SEQ ID NO: 1902933 - DNA, 15 bp, Homo sapiens
agtcacaggcttggg

SEQ ID NO: 1902934 - DNA, 15 bp, Homo sapiens
gtcacaggcttgggg

SEQ ID NO: 1902935 - DNA, 15 bp, Homo sapiens
tcacaggcttgggga

SEQ ID NO: 1902936 - DNA, 15 bp, Homo sapiens
cacaggcttggggag

SEQ ID NO: 1902937 - DNA, 15 bp, Homo sapiens
acaggcttggggaga

SEQ ID NO: 1902938 - DNA, 15 bp, Homo sapiens
caggcttggggagaa

SEQ ID NO: 1902939 - DNA, 15 bp, Homo sapiens
aggcttggggagaac

SEQ ID NO: 1902940 - DNA, 15 bp, Homo sapiens
ggcttggggagaaca

SEQ ID NO: 1902941 - DNA, 15 bp, Homo sapiens
gcttggggagaacat

SEQ ID NO: 1902942 - DNA, 15 bp, Homo sapiens
cttggggagaacatt

SEQ ID NO: 1902943 - DNA, 15 bp, Homo sapiens
ttggggagaacattc

SEQ ID NO: 1902944 - DNA, 15 bp, Homo sapiens
tggggagaacattca

SEQ ID NO: 1902945 - DNA, 15 bp, Homo sapiens
ggggagaacattcat

SEQ ID NO: 1902946 - DNA, 15 bp, Homo sapiens
gggagaacattcatc

SEQ ID NO: 1902947 - DNA, 15 bp, Homo sapiens
ggagaacattcatcc

SEQ ID NO: 1902948 - DNA, 15 bp, Homo sapiens
gagaacattcatcct

SEQ ID NO: 1902949 - DNA, 15 bp, Homo sapiens
agaacattcatccta

SEQ ID NO: 1902950 - DNA, 15 bp, Homo sapiens
gaacattcatcctat

SEQ ID NO: 1902951 - DNA, 15 bp, Homo sapiens
aacattcatcctatg

SEQ ID NO: 1902952 - DNA, 15 bp, Homo sapiens
acattcatcctatgg

SEQ ID NO: 1902953 - DNA, 15 bp, Homo sapiens
cattcatcctatggc

SEQ ID NO: 1902954 - DNA, 15 bp, Homo sapiens
attcatcctatggca

SEQ ID NO: 1902955 - DNA, 15 bp, Homo sapiens
ttcatcctatggcat

SEQ ID NO: 1902956 - DNA, 15 bp, Homo sapiens
tcatcctatggcatt

SEQ ID NO: 1902957 - DNA, 15 bp, Homo sapiens
catcctatggcattg

SEQ ID NO: 1902958 - DNA, 15 bp, Homo sapiens
atcctatggcattga

SEQ ID NO: 1902959 - DNA, 15 bp, Homo sapiens
tcctatggcattgaa

SEQ ID NO: 1902960 - DNA, 15 bp, Homo sapiens
cctatggcattgaat

SEQ ID NO: 1902961 - DNA, 15 bp, Homo sapiens
ctatggcattgaatg

SEQ ID NO: 1902962 - DNA, 15 bp, Homo sapiens
tatggcattgaatga

SEQ ID NO: 1902963 - DNA, 15 bp, Homo sapiens
atggcattgaatgaa

SEQ ID NO: 1902964 - DNA, 15 bp, Homo sapiens
tggcattgaatgaag

SEQ ID NO: 1902965 - DNA, 15 bp, Homo sapiens
ggcattgaatgaagt

SEQ ID NO: 1902966 - DNA, 15 bp, Homo sapiens
gcattgaatgaagtg

SEQ ID NO: 1902967 - DNA, 15 bp, Homo sapiens
cattgaatgaagtgt

SEQ ID NO: 1902968 - DNA, 15 bp, Homo sapiens
attgaatgaagtgtt

SEQ ID NO: 1902969 - DNA, 15 bp, Homo sapiens
ttgaatgaagtgttg

SEQ ID NO: 1902970 - DNA, 15 bp, Homo sapiens
tgaatgaagtgttgc

SEQ ID NO: 1902971 - DNA, 15 bp, Homo sapiens
gaatgaagtgttgcc

SEQ ID NO: 1902972 - DNA, 15 bp, Homo sapiens
aatgaagtgttgccc

SEQ ID NO: 1902973 - DNA, 15 bp, Homo sapiens
atgaagtgttgccca

SEQ ID NO: 1902974 - DNA, 15 bp, Homo sapiens
tgaagtgttgcccaa

SEQ ID NO: 1902975 - DNA, 15 bp, Homo sapiens
gaagtgttgcccaat

SEQ ID NO: 1902976 - DNA, 15 bp, Homo sapiens
aagtgttgcccaatt

SEQ ID NO: 1902977 - DNA, 15 bp, Homo sapiens
agtgttgcccaattc

SEQ ID NO: 1902978 - DNA, 15 bp, Homo sapiens
gtgttgcccaattct

SEQ ID NO: 1902979 - DNA, 15 bp, Homo sapiens
tgttgcccaattcta

SEQ ID NO: 1902980 - DNA, 15 bp, Homo sapiens
gttgcccaattctag

SEQ ID NO: 1902981 - DNA, 15 bp, Homo sapiens
ttgcccaattctaga

SEQ ID NO: 1902982 - DNA, 15 bp, Homo sapiens
tgcccaattctagaa

SEQ ID NO: 1902983 - DNA, 15 bp, Homo sapiens
gcccaattctagaat

SEQ ID NO: 1902984 - DNA, 15 bp, Homo sapiens
cccaattctagaatg

SEQ ID NO: 1902985 - DNA, 15 bp, Homo sapiens
ccaattctagaatgt

SEQ ID NO: 1902986 - DNA, 15 bp, Homo sapiens
caattctagaatgtc

SEQ ID NO: 1902987 - DNA, 15 bp, Homo sapiens
aattctagaatgtct

SEQ ID NO: 1902988 - DNA, 15 bp, Homo sapiens
attctagaatgtcta

SEQ ID NO: 1902989 - DNA, 15 bp, Homo sapiens
ttctagaatgtctaa

SEQ ID NO: 1902990 - DNA, 15 bp, Homo sapiens
tctagaatgtctaat

SEQ ID NO: 1902991 - DNA, 15 bp, Homo sapiens
ctagaatgtctaata

SEQ ID NO: 1902992 - DNA, 15 bp, Homo sapiens
tagaatgtctaataa

SEQ ID NO: 1902993 - DNA, 15 bp, Homo sapiens
agaatgtctaataaa

SEQ ID NO: 1902994 - DNA, 15 bp, Homo sapiens
gaatgtctaataaaa

SEQ ID NO: 1902995 - DNA, 15 bp, Homo sapiens
aatgtctaataaaat

SEQ ID NO: 1902996 - DNA, 15 bp, Homo sapiens
atgtctaataaaatt

SEQ ID NO: 1902997 - DNA, 15 bp, Homo sapiens
tgtctaataaaattt

SEQ ID NO: 1902998 - DNA, 15 bp, Homo sapiens
gtctaataaaatttt

SEQ ID NO: 1902999 - DNA, 15 bp, Homo sapiens
tctaataaaattttt

SEQ ID NO: 1903000 - DNA, 15 bp, Homo sapiens
ctaataaaatttttt

SEQ ID NO: 1903001 - DNA, 15 bp, Homo sapiens
taataaaattttttt

SEQ ID NO: 1903002 - DNA, 15 bp, Homo sapiens
aataaaattttttta

SEQ ID NO: 1903003 - DNA, 15 bp, Homo sapiens
ataaaatttttttaa

SEQ ID NO: 1903004 - DNA, 15 bp, Homo sapiens
taaaatttttttaaa

SEQ ID NO: 1903005 - DNA, 15 bp, Homo sapiens
aaaatttttttaaaa

SEQ ID NO: 1903006 - DNA, 15 bp, Homo sapiens
aaatttttttaaaaa

SEQ ID NO: 1903007 - DNA, 15 bp, Homo sapiens
aatttttttaaaaac

SEQ ID NO: 1903008 - DNA, 15 bp, Homo sapiens
atttttttaaaaacc

SEQ ID NO: 1903009 - DNA, 15 bp, Homo sapiens
tttttttaaaaaccc

SEQ ID NO: 1903010 - DNA, 15 bp, Homo sapiens
ttttttaaaaaccca

SEQ ID NO: 1903011 - DNA, 15 bp, Homo sapiens
tttttaaaaacccac

SEQ ID NO: 1903012 - DNA, 15 bp, Homo sapiens
ttttaaaaacccaca

SEQ ID NO: 1903013 - DNA, 15 bp, Homo sapiens
tttaaaaacccacag

SEQ ID NO: 1903014 - DNA, 15 bp, Homo sapiens
ttaaaaacccacagg

SEQ ID NO: 1903015 - DNA, 15 bp, Homo sapiens
taaaaacccacaggc

SEQ ID NO: 1903016 - DNA, 15 bp, Homo sapiens
aaaaacccacaggct

SEQ ID NO: 1903017 - DNA, 15 bp, Homo sapiens
aaaacccacaggctt

SEQ ID NO: 1903018 - DNA, 15 bp, Homo sapiens
aaacccacaggctta

SEQ ID NO: 1903019 - DNA, 15 bp, Homo sapiens
aacccacaggcttag

SEQ ID NO: 1903020 - DNA, 15 bp, Homo sapiens
acccacaggcttaga

SEQ ID NO: 1903021 - DNA, 15 bp, Homo sapiens
cccacaggcttagaa

SEQ ID NO: 1903022 - DNA, 15 bp, Homo sapiens
ccacaggcttagaat

SEQ ID NO: 1903023 - DNA, 15 bp, Homo sapiens
cacaggcttagaatt

SEQ ID NO: 1903024 - DNA, 15 bp, Homo sapiens
acaggcttagaatta

SEQ ID NO: 1903025 - DNA, 15 bp, Homo sapiens
caggcttagaattat

SEQ ID NO: 1903026 - DNA, 15 bp, Homo sapiens
aggcttagaattatt

SEQ ID NO: 1903027 - DNA, 15 bp, Homo sapiens
ggcttagaattattc

SEQ ID NO: 1903028 - DNA, 15 bp, Homo sapiens
gcttagaattattcc

SEQ ID NO: 1903029 - DNA, 15 bp, Homo sapiens
cttagaattattccg

SEQ ID NO: 1903030 - DNA, 15 bp, Homo sapiens
ttagaattattccgt

SEQ ID NO: 1903031 - DNA, 15 bp, Homo sapiens
tagaattattccgta

SEQ ID NO: 1903032 - DNA, 15 bp, Homo sapiens
agaattattccgtag

SEQ ID NO: 1903033 - DNA, 15 bp, Homo sapiens
gaattattccgtaga

SEQ ID NO: 1903034 - DNA, 15 bp, Homo sapiens
aattattccgtagat

SEQ ID NO: 1903035 - DNA, 15 bp, Homo sapiens
attattccgtagata

SEQ ID NO: 1903036 - DNA, 15 bp, Homo sapiens
ttattccgtagatat

SEQ ID NO: 1903037 - DNA, 15 bp, Homo sapiens
tattccgtagatatg

SEQ ID NO: 1903038 - DNA, 15 bp, Homo sapiens
attccgtagatatga

SEQ ID NO: 1903039 - DNA, 15 bp, Homo sapiens
ttccgtagatatgaa

SEQ ID NO: 1903040 - DNA, 15 bp, Homo sapiens
tccgtagatatgaag

SEQ ID NO: 1903041 - DNA, 15 bp, Homo sapiens
ccgtagatatgaagt

SEQ ID NO: 1903042 - DNA, 15 bp, Homo sapiens
cgtagatatgaagta

SEQ ID NO: 1903043 - DNA, 15 bp, Homo sapiens
gtagatatgaagtaa

SEQ ID NO: 1903044 - DNA, 15 bp, Homo sapiens
tagatatgaagtaat

SEQ ID NO: 1903045 - DNA, 15 bp, Homo sapiens
agatatgaagtaatg

SEQ ID NO: 1903046 - DNA, 15 bp, Homo sapiens
gatatgaagtaatgt

SEQ ID NO: 1903047 - DNA, 15 bp, Homo sapiens
atatgaagtaatgta

SEQ ID NO: 1903048 - DNA, 15 bp, Homo sapiens
tatgaagtaatgtag

SEQ ID NO: 1903049 - DNA, 15 bp, Homo sapiens
atgaagtaatgtagt

SEQ ID NO: 1903050 - DNA, 15 bp, Homo sapiens
tgaagtaatgtagtt

SEQ ID NO: 1903051 - DNA, 15 bp, Homo sapiens
gaagtaatgtagtta

SEQ ID NO: 1903052 - DNA, 15 bp, Homo sapiens
aagtaatgtagttag

SEQ ID NO: 1903053 - DNA, 15 bp, Homo sapiens
agtaatgtagttaga

SEQ ID NO: 1903054 - DNA, 15 bp, Homo sapiens
gtaatgtagttagaa

SEQ ID NO: 1903055 - DNA, 15 bp, Homo sapiens
taatgtagttagaac

SEQ ID NO: 1903056 - DNA, 15 bp, Homo sapiens
aatgtagttagaact

SEQ ID NO: 1903057 - DNA, 15 bp, Homo sapiens
atgtagttagaactt

SEQ ID NO: 1903058 - DNA, 15 bp, Homo sapiens
tgtagttagaactta

SEQ ID NO: 1903059 - DNA, 15 bp, Homo sapiens
gtagttagaacttag

SEQ ID NO: 1903060 - DNA, 15 bp, Homo sapiens
tagttagaacttagt

SEQ ID NO: 1903061 - DNA, 15 bp, Homo sapiens
agttagaacttagtg

SEQ ID NO: 1903062 - DNA, 15 bp, Homo sapiens
gttagaacttagtgg

SEQ ID NO: 1903063 - DNA, 15 bp, Homo sapiens
ttagaacttagtgga

SEQ ID NO: 1903064 - DNA, 15 bp, Homo sapiens
tagaacttagtggag

SEQ ID NO: 1903065 - DNA, 15 bp, Homo sapiens
agaacttagtggagt

SEQ ID NO: 1903066 - DNA, 15 bp, Homo sapiens
gaacttagtggagtt

SEQ ID NO: 1903067 - DNA, 15 bp, Homo sapiens
aacttagtggagttc

SEQ ID NO: 1903068 - DNA, 15 bp, Homo sapiens
acttagtggagttct

SEQ ID NO: 1903069 - DNA, 15 bp, Homo sapiens
cttagtggagttctt

SEQ ID NO: 1903070 - DNA, 15 bp, Homo sapiens
ttagtggagttcttt

SEQ ID NO: 1903071 - DNA, 15 bp, Homo sapiens
tagtggagttcttta

SEQ ID NO: 1903072 - DNA, 15 bp, Homo sapiens
agtggagttctttag

SEQ ID NO: 1903073 - DNA, 15 bp, Homo sapiens
gtggagttctttaga

SEQ ID NO: 1903074 - DNA, 15 bp, Homo sapiens
tggagttctttagat

SEQ ID NO: 1903075 - DNA, 15 bp, Homo sapiens
ggagttctttagatt

SEQ ID NO: 1903076 - DNA, 15 bp, Homo sapiens
gagttctttagatta

SEQ ID NO: 1903077 - DNA, 15 bp, Homo sapiens
agttctttagattaa

SEQ ID NO: 1903078 - DNA, 15 bp, Homo sapiens
gttctttagattaac

SEQ ID NO: 1903079 - DNA, 15 bp, Homo sapiens
ttctttagattaact

SEQ ID NO: 1903080 - DNA, 15 bp, Homo sapiens
tctttagattaactt

SEQ ID NO: 1903081 - DNA, 15 bp, Homo sapiens
ctttagattaacttg

SEQ ID NO: 1903082 - DNA, 15 bp, Homo sapiens
tttagattaacttgt

SEQ ID NO: 1903083 - DNA, 15 bp, Homo sapiens
ttagattaacttgta

SEQ ID NO: 1903084 - DNA, 15 bp, Homo sapiens
tagattaacttgtaa

SEQ ID NO: 1903085 - DNA, 15 bp, Homo sapiens
agattaacttgtaat

SEQ ID NO: 1903086 - DNA, 15 bp, Homo sapiens
gattaacttgtaatt

SEQ ID NO: 1903087 - DNA, 15 bp, Homo sapiens
attaacttgtaattt

SEQ ID NO: 1903088 - DNA, 15 bp, Homo sapiens
ttaacttgtaatttg

SEQ ID NO: 1903089 - DNA, 15 bp, Homo sapiens
taacttgtaatttga

SEQ ID NO: 1903090 - DNA, 15 bp, Homo sapiens
aacttgtaatttgaa

SEQ ID NO: 1903091 - DNA, 15 bp, Homo sapiens
acttgtaatttgaaa

SEQ ID NO: 1903092 - DNA, 15 bp, Homo sapiens
cttgtaatttgaaaa

SEQ ID NO: 1903093 - DNA, 15 bp, Homo sapiens
ttgtaatttgaaaaa

SEQ ID NO: 1903094 - DNA, 15 bp, Homo sapiens
tgtaatttgaaaaac

SEQ ID NO: 1903095 - DNA, 15 bp, Homo sapiens
gtaatttgaaaaacc

SEQ ID NO: 1903096 - DNA, 15 bp, Homo sapiens
taatttgaaaaacca

SEQ ID NO: 1903097 - DNA, 15 bp, Homo sapiens
aatttgaaaaaccaa

SEQ ID NO: 1903098 - DNA, 15 bp, Homo sapiens
atttgaaaaaccaaa

SEQ ID NO: 1903099 - DNA, 15 bp, Homo sapiens
tttgaaaaaccaaaa

SEQ ID NO: 1903100 - DNA, 15 bp, Homo sapiens
ttgaaaaaccaaaat

SEQ ID NO: 1903101 - DNA, 15 bp, Homo sapiens
tgaaaaaccaaaatt

SEQ ID NO: 1903102 - DNA, 15 bp, Homo sapiens
gaaaaaccaaaattg

SEQ ID NO: 1903103 - DNA, 15 bp, Homo sapiens
aaaaaccaaaattga

SEQ ID NO: 1903104 - DNA, 15 bp, Homo sapiens
aaaaccaaaattgaa

SEQ ID NO: 1903105 - DNA, 15 bp, Homo sapiens
aaaccaaaattgaaa

SEQ ID NO: 1903106 - DNA, 15 bp, Homo sapiens
aaccaaaattgaaat

SEQ ID NO: 1903107 - DNA, 15 bp, Homo sapiens
accaaaattgaaatt

SEQ ID NO: 1903108 - DNA, 15 bp, Homo sapiens
ccaaaattgaaattg

SEQ ID NO: 1903109 - DNA, 15 bp, Homo sapiens
caaaattgaaattgt

SEQ ID NO: 1903110 - DNA, 15 bp, Homo sapiens
aaaattgaaattgtg

SEQ ID NO: 1903111 - DNA, 15 bp, Homo sapiens
aaattgaaattgtga

SEQ ID NO: 1903112 - DNA, 15 bp, Homo sapiens
aattgaaattgtgaa

SEQ ID NO: 1903113 - DNA, 15 bp, Homo sapiens
attgaaattgtgaaa

SEQ ID NO: 1903114 - DNA, 15 bp, Homo sapiens
ttgaaattgtgaaat

SEQ ID NO: 1903115 - DNA, 15 bp, Homo sapiens
tgaaattgtgaaata

SEQ ID NO: 1903116 - DNA, 15 bp, Homo sapiens
gaaattgtgaaataa

SEQ ID NO: 1903117 - DNA, 15 bp, Homo sapiens
aaattgtgaaataac

SEQ ID NO: 1903118 - DNA, 15 bp, Homo sapiens
aattgtgaaataaca

SEQ ID NO: 1903119 - DNA, 15 bp, Homo sapiens
attgtgaaataacat

SEQ ID NO: 1903120 - DNA, 15 bp, Homo sapiens
ttgtgaaataacatg

SEQ ID NO: 1903121 - DNA, 15 bp, Homo sapiens
tgtgaaataacatgg

SEQ ID NO: 1903122 - DNA, 15 bp, Homo sapiens
gtgaaataacatggg

SEQ ID NO: 1903123 - DNA, 15 bp, Homo sapiens
tgaaataacatgggc

SEQ ID NO: 1903124 - DNA, 15 bp, Homo sapiens
gaaataacatgggct

SEQ ID NO: 1903125 - DNA, 15 bp, Homo sapiens
aaataacatgggctc

SEQ ID NO: 1903126 - DNA, 15 bp, Homo sapiens
aataacatgggctct

SEQ ID NO: 1903127 - DNA, 15 bp, Homo sapiens
ataacatgggctctt

SEQ ID NO: 1903128 - DNA, 15 bp, Homo sapiens
taacatgggctcttt

SEQ ID NO: 1903129 - DNA, 15 bp, Homo sapiens
aacatgggctctttg

SEQ ID NO: 1903130 - DNA, 15 bp, Homo sapiens
acatgggctctttga

SEQ ID NO: 1903131 - DNA, 15 bp, Homo sapiens
catgggctctttgag

SEQ ID NO: 1903132 - DNA, 15 bp, Homo sapiens
atgggctctttgagg

SEQ ID NO: 1903133 - DNA, 15 bp, Homo sapiens
tgggctctttgaggt

SEQ ID NO: 1903134 - DNA, 15 bp, Homo sapiens
gggctctttgaggtc

SEQ ID NO: 1903135 - DNA, 15 bp, Homo sapiens
ggctctttgaggtct

SEQ ID NO: 1903136 - DNA, 15 bp, Homo sapiens
gctctttgaggtctt

SEQ ID NO: 1903137 - DNA, 15 bp, Homo sapiens
ctctttgaggtcttt

SEQ ID NO: 1903138 - DNA, 15 bp, Homo sapiens
tctttgaggtctttt

SEQ ID NO: 1903139 - DNA, 15 bp, Homo sapiens
ctttgaggtcttttc

SEQ ID NO: 1903140 - DNA, 15 bp, Homo sapiens
tttgaggtcttttcc

SEQ ID NO: 1903141 - DNA, 15 bp, Homo sapiens
ttgaggtcttttcca

SEQ ID NO: 1903142 - DNA, 15 bp, Homo sapiens
tgaggtcttttccag

SEQ ID NO: 1903143 - DNA, 15 bp, Homo sapiens
gaggtcttttccagt

SEQ ID NO: 1903144 - DNA, 15 bp, Homo sapiens
aggtcttttccagta

SEQ ID NO: 1903145 - DNA, 15 bp, Homo sapiens
ggtcttttccagtaa

SEQ ID NO: 1903146 - DNA, 15 bp, Homo sapiens
gtcttttccagtaaa

SEQ ID NO: 1903147 - DNA, 15 bp, Homo sapiens
tcttttccagtaaaa

SEQ ID NO: 1903148 - DNA, 15 bp, Homo sapiens
cttttccagtaaaac

SEQ ID NO: 1903149 - DNA, 15 bp, Homo sapiens
ttttccagtaaaaca

SEQ ID NO: 1903150 - DNA, 15 bp, Homo sapiens
tttccagtaaaacag

SEQ ID NO: 1903151 - DNA, 15 bp, Homo sapiens
ttccagtaaaacagt

SEQ ID NO: 1903152 - DNA, 15 bp, Homo sapiens
tccagtaaaacagtt

SEQ ID NO: 1903153 - DNA, 15 bp, Homo sapiens
ccagtaaaacagtta

SEQ ID NO: 1903154 - DNA, 15 bp, Homo sapiens
cagtaaaacagttac

SEQ ID NO: 1903155 - DNA, 15 bp, Homo sapiens
agtaaaacagttaca

SEQ ID NO: 1903156 - DNA, 15 bp, Homo sapiens
gtaaaacagttacag

SEQ ID NO: 1903157 - DNA, 15 bp, Homo sapiens
taaaacagttacagt

SEQ ID NO: 1903158 - DNA, 15 bp, Homo sapiens
aaaacagttacagta

SEQ ID NO: 1903159 - DNA, 15 bp, Homo sapiens
aaacagttacagtaa

SEQ ID NO: 1903160 - DNA, 15 bp, Homo sapiens
aacagttacagtaaa

SEQ ID NO: 1903161 - DNA, 15 bp, Homo sapiens
acagttacagtaaag

SEQ ID NO: 1903162 - DNA, 15 bp, Homo sapiens
cagttacagtaaagc

SEQ ID NO: 1903163 - DNA, 15 bp, Homo sapiens
agttacagtaaagct

SEQ ID NO: 1903164 - DNA, 15 bp, Homo sapiens
gttacagtaaagctg

SEQ ID NO: 1903165 - DNA, 15 bp, Homo sapiens
ttacagtaaagctgc

SEQ ID NO: 1903166 - DNA, 15 bp, Homo sapiens
tacagtaaagctgct

SEQ ID NO: 1903167 - DNA, 15 bp, Homo sapiens
acagtaaagctgctt

SEQ ID NO: 1903168 - DNA, 15 bp, Homo sapiens
cagtaaagctgcttg

SEQ ID NO: 1903169 - DNA, 15 bp, Homo sapiens
agtaaagctgcttgg

SEQ ID NO: 1903170 - DNA, 15 bp, Homo sapiens
gtaaagctgcttggc

SEQ ID NO: 1903171 - DNA, 15 bp, Homo sapiens
taaagctgcttggca

SEQ ID NO: 1903172 - DNA, 15 bp, Homo sapiens
aaagctgcttggcag

SEQ ID NO: 1903173 - DNA, 15 bp, Homo sapiens
aagctgcttggcagt

SEQ ID NO: 1903174 - DNA, 15 bp, Homo sapiens
agctgcttggcagtg

SEQ ID NO: 1903175 - DNA, 15 bp, Homo sapiens
gctgcttggcagtga

SEQ ID NO: 1903176 - DNA, 15 bp, Homo sapiens
ctgcttggcagtgat

SEQ ID NO: 1903177 - DNA, 15 bp, Homo sapiens
tgcttggcagtgatt

SEQ ID NO: 1903178 - DNA, 15 bp, Homo sapiens
gcttggcagtgattt

SEQ ID NO: 1903179 - DNA, 15 bp, Homo sapiens
cttggcagtgatttt

SEQ ID NO: 1903180 - DNA, 15 bp, Homo sapiens
ttggcagtgattttc

SEQ ID NO: 1903181 - DNA, 15 bp, Homo sapiens
tggcagtgattttcc

SEQ ID NO: 1903182 - DNA, 15 bp, Homo sapiens
ggcagtgattttcct

SEQ ID NO: 1903183 - DNA, 15 bp, Homo sapiens
gcagtgattttccta

SEQ ID NO: 1903184 - DNA, 15 bp, Homo sapiens
cagtgattttcctag

SEQ ID NO: 1903185 - DNA, 15 bp, Homo sapiens
agtgattttcctaga

SEQ ID NO: 1903186 - DNA, 15 bp, Homo sapiens
gtgattttcctagac

SEQ ID NO: 1903187 - DNA, 15 bp, Homo sapiens
tgattttcctagaca

SEQ ID NO: 1903188 - DNA, 15 bp, Homo sapiens
gattttcctagacac

SEQ ID NO: 1903189 - DNA, 15 bp, Homo sapiens
attttcctagacact

SEQ ID NO: 1903190 - DNA, 15 bp, Homo sapiens
ttttcctagacactt

SEQ ID NO: 1903191 - DNA, 15 bp, Homo sapiens
tttcctagacacttt

SEQ ID NO: 1903192 - DNA, 15 bp, Homo sapiens
ttcctagacactttg

SEQ ID NO: 1903193 - DNA, 15 bp, Homo sapiens
tcctagacactttgg

SEQ ID NO: 1903194 - DNA, 15 bp, Homo sapiens
cctagacactttggc

SEQ ID NO: 1903195 - DNA, 15 bp, Homo sapiens
ctagacactttggct

SEQ ID NO: 1903196 - DNA, 15 bp, Homo sapiens
tagacactttggcta

SEQ ID NO: 1903197 - DNA, 15 bp, Homo sapiens
agacactttggctag

SEQ ID NO: 1903198 - DNA, 15 bp, Homo sapiens
gacactttggctagt

SEQ ID NO: 1903199 - DNA, 15 bp, Homo sapiens
acactttggctagtc

SEQ ID NO: 1903200 - DNA, 15 bp, Homo sapiens
cactttggctagtca

SEQ ID NO: 1903201 - DNA, 15 bp, Homo sapiens
actttggctagtcat

SEQ ID NO: 1903202 - DNA, 15 bp, Homo sapiens
ctttggctagtcatc

SEQ ID NO: 1903203 - DNA, 15 bp, Homo sapiens
tttggctagtcatct

SEQ ID NO: 1903204 - DNA, 15 bp, Homo sapiens
ttggctagtcatctc

SEQ ID NO: 1903205 - DNA, 15 bp, Homo sapiens
tggctagtcatctcc

SEQ ID NO: 1903206 - DNA, 15 bp, Homo sapiens
ggctagtcatctcct

SEQ ID NO: 1903207 - DNA, 15 bp, Homo sapiens
gctagtcatctcctg

SEQ ID NO: 1903208 - DNA, 15 bp, Homo sapiens
ctagtcatctcctgt

SEQ ID NO: 1903209 - DNA, 15 bp, Homo sapiens
tagtcatctcctgtg

SEQ ID NO: 1903210 - DNA, 15 bp, Homo sapiens
agtcatctcctgtga

SEQ ID NO: 1903211 - DNA, 15 bp, Homo sapiens
gtcatctcctgtgac

SEQ ID NO: 1903212 - DNA, 15 bp, Homo sapiens
tcatctcctgtgact

SEQ ID NO: 1903213 - DNA, 15 bp, Homo sapiens
catctcctgtgactg

SEQ ID NO: 1903214 - DNA, 15 bp, Homo sapiens
atctcctgtgactgc

SEQ ID NO: 1903215 - DNA, 15 bp, Homo sapiens
tctcctgtgactgct

SEQ ID NO: 1903216 - DNA, 15 bp, Homo sapiens
ctcctgtgactgctg

SEQ ID NO: 1903217 - DNA, 15 bp, Homo sapiens
tcctgtgactgctgt

SEQ ID NO: 1903218 - DNA, 15 bp, Homo sapiens
cctgtgactgctgtt

SEQ ID NO: 1903219 - DNA, 15 bp, Homo sapiens
ctgtgactgctgtta

SEQ ID NO: 1903220 - DNA, 15 bp, Homo sapiens
tgtgactgctgttaa

SEQ ID NO: 1903221 - DNA, 15 bp, Homo sapiens
gtgactgctgttaat

SEQ ID NO: 1903222 - DNA, 15 bp, Homo sapiens
tgactgctgttaatt

SEQ ID NO: 1903223 - DNA, 15 bp, Homo sapiens
gactgctgttaatta

SEQ ID NO: 1903224 - DNA, 15 bp, Homo sapiens
actgctgttaattaa

SEQ ID NO: 1903225 - DNA, 15 bp, Homo sapiens
ctgctgttaattaaa

SEQ ID NO: 1903226 - DNA, 15 bp, Homo sapiens
tgctgttaattaaat

SEQ ID NO: 1903227 - DNA, 15 bp, Homo sapiens
gctgttaattaaata

SEQ ID NO: 1903228 - DNA, 15 bp, Homo sapiens
ctgttaattaaatat

SEQ ID NO: 1903229 - DNA, 15 bp, Homo sapiens
tgttaattaaatatg

SEQ ID NO: 1903230 - DNA, 15 bp, Homo sapiens
gttaattaaatatgg

SEQ ID NO: 1903231 - DNA, 15 bp, Homo sapiens
ttaattaaatatggt

SEQ ID NO: 1903232 - DNA, 15 bp, Homo sapiens
taattaaatatggtt

SEQ ID NO: 1903233 - DNA, 15 bp, Homo sapiens
aattaaatatggttt

SEQ ID NO: 1903234 - DNA, 15 bp, Homo sapiens
attaaatatggtttg

SEQ ID NO: 1903235 - DNA, 15 bp, Homo sapiens
ttaaatatggtttgt

SEQ ID NO: 1903236 - DNA, 15 bp, Homo sapiens
taaatatggtttgta

SEQ ID NO: 1903237 - DNA, 15 bp, Homo sapiens
aaatatggtttgtag

SEQ ID NO: 1903238 - DNA, 15 bp, Homo sapiens
aatatggtttgtagc

SEQ ID NO: 1903239 - DNA, 15 bp, Homo sapiens
atatggtttgtagct

SEQ ID NO: 1903240 - DNA, 15 bp, Homo sapiens
tatggtttgtagcta

SEQ ID NO: 1903241 - DNA, 15 bp, Homo sapiens
atggtttgtagctaa

SEQ ID NO: 1903242 - DNA, 15 bp, Homo sapiens
tggtttgtagctaag

SEQ ID NO: 1903243 - DNA, 15 bp, Homo sapiens
ggtttgtagctaagc

SEQ ID NO: 1903244 - DNA, 15 bp, Homo sapiens
gtttgtagctaagca

SEQ ID NO: 1903245 - DNA, 15 bp, Homo sapiens
tttgtagctaagcag

SEQ ID NO: 1903246 - DNA, 15 bp, Homo sapiens
ttgtagctaagcagc

SEQ ID NO: 1903247 - DNA, 15 bp, Homo sapiens
tgtagctaagcagcc

SEQ ID NO: 1903248 - DNA, 15 bp, Homo sapiens
gtagctaagcagcct

SEQ ID NO: 1903249 - DNA, 15 bp, Homo sapiens
tagctaagcagcctg

SEQ ID NO: 1903250 - DNA, 15 bp, Homo sapiens
agctaagcagcctgt

SEQ ID NO: 1903251 - DNA, 15 bp, Homo sapiens
gctaagcagcctgta

SEQ ID NO: 1903252 - DNA, 15 bp, Homo sapiens
ctaagcagcctgtaa

SEQ ID NO: 1903253 - DNA, 15 bp, Homo sapiens
taagcagcctgtaag

SEQ ID NO: 1903254 - DNA, 15 bp, Homo sapiens
aagcagcctgtaagg

SEQ ID NO: 1903255 - DNA, 15 bp, Homo sapiens
agcagcctgtaagga

SEQ ID NO: 1903256 - DNA, 15 bp, Homo sapiens
gcagcctgtaaggag

SEQ ID NO: 1903257 - DNA, 15 bp, Homo sapiens
cagcctgtaaggaga

SEQ ID NO: 1903258 - DNA, 15 bp, Homo sapiens
agcctgtaaggagaa

SEQ ID NO: 1903259 - DNA, 15 bp, Homo sapiens
gcctgtaaggagaag

SEQ ID NO: 1903260 - DNA, 15 bp, Homo sapiens
cctgtaaggagaaga

SEQ ID NO: 1903261 - DNA, 15 bp, Homo sapiens
ctgtaaggagaagac

SEQ ID NO: 1903262 - DNA, 15 bp, Homo sapiens
tgtaaggagaagact

SEQ ID NO: 1903263 - DNA, 15 bp, Homo sapiens
gtaaggagaagacta

SEQ ID NO: 1903264 - DNA, 15 bp, Homo sapiens
taaggagaagactat

SEQ ID NO: 1903265 - DNA, 15 bp, Homo sapiens
aaggagaagactatg

SEQ ID NO: 1903266 - DNA, 15 bp, Homo sapiens
aggagaagactatgg

SEQ ID NO: 1903267 - DNA, 15 bp, Homo sapiens
ggagaagactatgga

SEQ ID NO: 1903268 - DNA, 15 bp, Homo sapiens
gagaagactatggaa

SEQ ID NO: 1903269 - DNA, 15 bp, Homo sapiens
agaagactatggaag

SEQ ID NO: 1903270 - DNA, 15 bp, Homo sapiens
gaagactatggaagt

SEQ ID NO: 1903271 - DNA, 15 bp, Homo sapiens
aagactatggaagta

SEQ ID NO: 1903272 - DNA, 15 bp, Homo sapiens
agactatggaagtat

SEQ ID NO: 1903273 - DNA, 15 bp, Homo sapiens
gactatggaagtatt

SEQ ID NO: 1903274 - DNA, 15 bp, Homo sapiens
actatggaagtattt

SEQ ID NO: 1903275 - DNA, 15 bp, Homo sapiens
ctatggaagtatttg

SEQ ID NO: 1903276 - DNA, 15 bp, Homo sapiens
tatggaagtatttgc

SEQ ID NO: 1903277 - DNA, 15 bp, Homo sapiens
atggaagtatttgca

SEQ ID NO: 1903278 - DNA, 15 bp, Homo sapiens
tggaagtatttgcat

SEQ ID NO: 1903279 - DNA, 15 bp, Homo sapiens
ggaagtatttgcata

SEQ ID NO: 1903280 - DNA, 15 bp, Homo sapiens
gaagtatttgcatat

SEQ ID NO: 1903281 - DNA, 15 bp, Homo sapiens
aagtatttgcatatt

SEQ ID NO: 1903282 - DNA, 15 bp, Homo sapiens
agtatttgcatattc

SEQ ID NO: 1903283 - DNA, 15 bp, Homo sapiens
gtatttgcatattct

SEQ ID NO: 1903284 - DNA, 15 bp, Homo sapiens
tatttgcatattctc

SEQ ID NO: 1903285 - DNA, 15 bp, Homo sapiens
atttgcatattctct

SEQ ID NO: 1903286 - DNA, 15 bp, Homo sapiens
tttgcatattctctc

SEQ ID NO: 1903287 - DNA, 15 bp, Homo sapiens
ttgcatattctctcc

SEQ ID NO: 1903288 - DNA, 15 bp, Homo sapiens
tgcatattctctcct

SEQ ID NO: 1903289 - DNA, 15 bp, Homo sapiens
gcatattctctcctt

SEQ ID NO: 1903290 - DNA, 15 bp, Homo sapiens
catattctctccttg

SEQ ID NO: 1903291 - DNA, 15 bp, Homo sapiens
atattctctccttga

SEQ ID NO: 1903292 - DNA, 15 bp, Homo sapiens
tattctctccttgaa

SEQ ID NO: 1903293 - DNA, 15 bp, Homo sapiens
attctctccttgaaa

SEQ ID NO: 1903294 - DNA, 15 bp, Homo sapiens
ttctctccttgaaaa

SEQ ID NO: 1903295 - DNA, 15 bp, Homo sapiens
tctctccttgaaaat

SEQ ID NO: 1903296 - DNA, 15 bp, Homo sapiens
ctctccttgaaaata

SEQ ID NO: 1903297 - DNA, 15 bp, Homo sapiens
tctccttgaaaatac

SEQ ID NO: 1903298 - DNA, 15 bp, Homo sapiens
ctccttgaaaatact

SEQ ID NO: 1903299 - DNA, 15 bp, Homo sapiens
tccttgaaaatacta

SEQ ID NO: 1903300 - DNA, 15 bp, Homo sapiens
ccttgaaaatactac

SEQ ID NO: 1903301 - DNA, 15 bp, Homo sapiens
cttgaaaatactacc

SEQ ID NO: 1903302 - DNA, 15 bp, Homo sapiens
ttgaaaatactacct

SEQ ID NO: 1903303 - DNA, 15 bp, Homo sapiens
tgaaaatactacctg

SEQ ID NO: 1903304 - DNA, 15 bp, Homo sapiens
gaaaatactacctgg

SEQ ID NO: 1903305 - DNA, 15 bp, Homo sapiens
aaaatactacctggt

SEQ ID NO: 1903306 - DNA, 15 bp, Homo sapiens
aaatactacctggtc

SEQ ID NO: 1903307 - DNA, 15 bp, Homo sapiens
aatactacctggtct

SEQ ID NO: 1903308 - DNA, 15 bp, Homo sapiens
atactacctggtctt

SEQ ID NO: 1903309 - DNA, 15 bp, Homo sapiens
tactacctggtcttt

SEQ ID NO: 1903310 - DNA, 15 bp, Homo sapiens
actacctggtctttg

SEQ ID NO: 1903311 - DNA, 15 bp, Homo sapiens
ctacctggtctttgg

SEQ ID NO: 1903312 - DNA, 15 bp, Homo sapiens
tacctggtctttggc

SEQ ID NO: 1903313 - DNA, 15 bp, Homo sapiens
acctggtctttggct

SEQ ID NO: 1903314 - DNA, 15 bp, Homo sapiens
cctggtctttggctt

SEQ ID NO: 1903315 - DNA, 15 bp, Homo sapiens
ctggtctttggcttt

SEQ ID NO: 1903316 - DNA, 15 bp, Homo sapiens
tggtctttggcttta

SEQ ID NO: 1903317 - DNA, 15 bp, Homo sapiens
ggtctttggctttaa

SEQ ID NO: 1903318 - DNA, 15 bp, Homo sapiens
gtctttggctttaag

SEQ ID NO: 1903319 - DNA, 15 bp, Homo sapiens
tctttggctttaagt

SEQ ID NO: 1903320 - DNA, 15 bp, Homo sapiens
ctttggctttaagtt

SEQ ID NO: 1903321 - DNA, 15 bp, Homo sapiens
tttggctttaagtta

SEQ ID NO: 1903322 - DNA, 15 bp, Homo sapiens
ttggctttaagttat

SEQ ID NO: 1903323 - DNA, 15 bp, Homo sapiens
tggctttaagttata

SEQ ID NO: 1903324 - DNA, 15 bp, Homo sapiens
ggctttaagttatac

SEQ ID NO: 1903325 - DNA, 15 bp, Homo sapiens
gctttaagttatact

SEQ ID NO: 1903326 - DNA, 15 bp, Homo sapiens
ctttaagttatactt

SEQ ID NO: 1903327 - DNA, 15 bp, Homo sapiens
tttaagttatacttt

SEQ ID NO: 1903328 - DNA, 15 bp, Homo sapiens
ttaagttatactttt

SEQ ID NO: 1903329 - DNA, 15 bp, Homo sapiens
taagttatactttta

SEQ ID NO: 1903330 - DNA, 15 bp, Homo sapiens
aagttatacttttat

SEQ ID NO: 1903331 - DNA, 15 bp, Homo sapiens
agttatacttttatt

SEQ ID NO: 1903332 - DNA, 15 bp, Homo sapiens
gttatacttttattt

SEQ ID NO: 1903333 - DNA, 15 bp, Homo sapiens
ttatacttttatttt

SEQ ID NO: 1903334 - DNA, 15 bp, Homo sapiens
tatacttttattttc

SEQ ID NO: 1903335 - DNA, 15 bp, Homo sapiens
atacttttattttcc

SEQ ID NO: 1903336 - DNA, 15 bp, Homo sapiens
tacttttattttccc

SEQ ID NO: 1903337 - DNA, 15 bp, Homo sapiens
acttttattttcccc

SEQ ID NO: 1903338 - DNA, 15 bp, Homo sapiens
cttttattttcccct

SEQ ID NO: 1903339 - DNA, 15 bp, Homo sapiens
ttttattttcccctg

SEQ ID NO: 1903340 - DNA, 15 bp, Homo sapiens
tttattttcccctgt

SEQ ID NO: 1903341 - DNA, 15 bp, Homo sapiens
ttattttcccctgta

SEQ ID NO: 1903342 - DNA, 15 bp, Homo sapiens
tattttcccctgtag

SEQ ID NO: 1903343 - DNA, 15 bp, Homo sapiens
attttcccctgtaga

SEQ ID NO: 1903344 - DNA, 15 bp, Homo sapiens
ttttcccctgtagaa

SEQ ID NO: 1903345 - DNA, 15 bp, Homo sapiens
tttcccctgtagaat

SEQ ID NO: 1903346 - DNA, 15 bp, Homo sapiens
ttcccctgtagaata

SEQ ID NO: 1903347 - DNA, 15 bp, Homo sapiens
tcccctgtagaataa

SEQ ID NO: 1903348 - DNA, 15 bp, Homo sapiens
cccctgtagaataac

SEQ ID NO: 1903349 - DNA, 15 bp, Homo sapiens
ccctgtagaataact

SEQ ID NO: 1903350 - DNA, 15 bp, Homo sapiens
cctgtagaataacta

SEQ ID NO: 1903351 - DNA, 15 bp, Homo sapiens
ctgtagaataactat

SEQ ID NO: 1903352 - DNA, 15 bp, Homo sapiens
gtagaataactatta

SEQ ID NO: 1903353 - DNA, 15 bp, Homo sapiens
tagaataactattaa

SEQ ID NO: 1903354 - DNA, 15 bp, Homo sapiens
agaataactattaaa

SEQ ID NO: 1903355 - DNA, 15 bp, Homo sapiens
gaataactattaaag

SEQ ID NO: 1903356 - DNA, 15 bp, Homo sapiens
aataactattaaagt

SEQ ID NO: 1903357 - DNA, 15 bp, Homo sapiens
ataactattaaagta

SEQ ID NO: 1903358 - DNA, 15 bp, Homo sapiens
taactattaaagtat

SEQ ID NO: 1903359 - DNA, 15 bp, Homo sapiens
aactattaaagtatt

SEQ ID NO: 1903360 - DNA, 15 bp, Homo sapiens
actattaaagtatta

SEQ ID NO: 1903361 - DNA, 15 bp, Homo sapiens
ctattaaagtattac

SEQ ID NO: 1903362 - DNA, 15 bp, Homo sapiens
tattaaagtattacc

SEQ ID NO: 1903363 - DNA, 15 bp, Homo sapiens
attaaagtattacct

SEQ ID NO: 1903364 - DNA, 15 bp, Homo sapiens
ttaaagtattaccta

SEQ ID NO: 1903365 - DNA, 15 bp, Homo sapiens
aaagtattacctatg

SEQ ID NO: 1903366 - DNA, 15 bp, Homo sapiens
aagtattacctatgg

SEQ ID NO: 1903367 - DNA, 15 bp, Homo sapiens
agtattacctatggt

SEQ ID NO: 1903368 - DNA, 15 bp, Homo sapiens
gtattacctatggtg

SEQ ID NO: 1903369 - DNA, 15 bp, Homo sapiens
tattacctatggtga

SEQ ID NO: 1903370 - DNA, 15 bp, Homo sapiens
attacctatggtgat

SEQ ID NO: 1903371 - DNA, 15 bp, Homo sapiens
ttacctatggtgatt

SEQ ID NO: 1903372 - DNA, 15 bp, Homo sapiens
tacctatggtgatta

SEQ ID NO: 1903373 - DNA, 15 bp, Homo sapiens
acctatggtgattag

SEQ ID NO: 1903374 - DNA, 15 bp, Homo sapiens
cctatggtgattaga

SEQ ID NO: 1903375 - DNA, 15 bp, Homo sapiens
ctatggtgattagac

SEQ ID NO: 1903376 - DNA, 15 bp, Homo sapiens
tatggtgattagact

SEQ ID NO: 1903377 - DNA, 15 bp, Homo sapiens
atggtgattagacta

SEQ ID NO: 1903378 - DNA, 15 bp, Homo sapiens
tggtgattagactaa

SEQ ID NO: 1903379 - DNA, 15 bp, Homo sapiens
ggtgattagactaag

SEQ ID NO: 1903380 - DNA, 15 bp, Homo sapiens
gtgattagactaaga

SEQ ID NO: 1903381 - DNA, 15 bp, Homo sapiens
tgattagactaagaa

SEQ ID NO: 1903382 - DNA, 15 bp, Homo sapiens
gattagactaagaag

SEQ ID NO: 1903383 - DNA, 15 bp, Homo sapiens
attagactaagaagt

SEQ ID NO: 1903384 - DNA, 15 bp, Homo sapiens
ttagactaagaagta

SEQ ID NO: 1903385 - DNA, 15 bp, Homo sapiens
tagactaagaagtaa

SEQ ID NO: 1903386 - DNA, 15 bp, Homo sapiens
agactaagaagtaaa

SEQ ID NO: 1903387 - DNA, 15 bp, Homo sapiens
gactaagaagtaaaa

SEQ ID NO: 1903388 - DNA, 15 bp, Homo sapiens
actaagaagtaaaac

SEQ ID NO: 1903389 - DNA, 15 bp, Homo sapiens
ctaagaagtaaaaca

SEQ ID NO: 1903390 - DNA, 15 bp, Homo sapiens
taagaagtaaaacat

SEQ ID NO: 1903391 - DNA, 15 bp, Homo sapiens
aagaagtaaaacatg

SEQ ID NO: 1903392 - DNA, 15 bp, Homo sapiens
agaagtaaaacatga

SEQ ID NO: 1903393 - DNA, 15 bp, Homo sapiens
gaagtaaaacatgaa

SEQ ID NO: 1903394 - DNA, 15 bp, Homo sapiens
aagtaaaacatgaaa

SEQ ID NO: 1903395 - DNA, 15 bp, Homo sapiens
agtaaaacatgaaat

SEQ ID NO: 1903396 - DNA, 15 bp, Homo sapiens
gtaaaacatgaaatc

SEQ ID NO: 1903397 - DNA, 15 bp, Homo sapiens
taaaacatgaaatca

SEQ ID NO: 1903398 - DNA, 15 bp, Homo sapiens
aaaacatgaaatcag

SEQ ID NO: 1903399 - DNA, 15 bp, Homo sapiens
aaacatgaaatcagt

SEQ ID NO: 1903400 - DNA, 15 bp, Homo sapiens
aacatgaaatcagtc

SEQ ID NO: 1903401 - DNA, 15 bp, Homo sapiens
acatgaaatcagtca

SEQ ID NO: 1903402 - DNA, 15 bp, Homo sapiens
catgaaatcagtcat

SEQ ID NO: 1903403 - DNA, 15 bp, Homo sapiens
atgaaatcagtcatt

SEQ ID NO: 1903404 - DNA, 15 bp, Homo sapiens
tgaaatcagtcattg

SEQ ID NO: 1903405 - DNA, 15 bp, Homo sapiens
gaaatcagtcattgt

SEQ ID NO: 1903406 - DNA, 15 bp, Homo sapiens
aaatcagtcattgtt

SEQ ID NO: 1903407 - DNA, 15 bp, Homo sapiens
aatcagtcattgttg

SEQ ID NO: 1903408 - DNA, 15 bp, Homo sapiens
atcagtcattgttgg

SEQ ID NO: 1903409 - DNA, 15 bp, Homo sapiens
tcagtcattgttggt

SEQ ID NO: 1903410 - DNA, 15 bp, Homo sapiens
cagtcattgttggtg

SEQ ID NO: 1903411 - DNA, 15 bp, Homo sapiens
agtcattgttggtgc

SEQ ID NO: 1903412 - DNA, 15 bp, Homo sapiens
gtcattgttggtgcc

SEQ ID NO: 1903413 - DNA, 15 bp, Homo sapiens
tcattgttggtgccc

SEQ ID NO: 1903414 - DNA, 15 bp, Homo sapiens
cattgttggtgccct

SEQ ID NO: 1903415 - DNA, 15 bp, Homo sapiens
attgttggtgccctg

SEQ ID NO: 1903416 - DNA, 15 bp, Homo sapiens
ttgttggtgccctgg

SEQ ID NO: 1903417 - DNA, 15 bp, Homo sapiens
tgttggtgccctggt

SEQ ID NO: 1903418 - DNA, 15 bp, Homo sapiens
gttggtgccctggtg

SEQ ID NO: 1903419 - DNA, 15 bp, Homo sapiens
ttggtgccctggtgc

SEQ ID NO: 1903420 - DNA, 15 bp, Homo sapiens
tggtgccctggtgcc

SEQ ID NO: 1903421 - DNA, 15 bp, Homo sapiens
ggtgccctggtgcct

SEQ ID NO: 1903422 - DNA, 15 bp, Homo sapiens
gtgccctggtgcctt

SEQ ID NO: 1903423 - DNA, 15 bp, Homo sapiens
tgccctggtgccttc

SEQ ID NO: 1903424 - DNA, 15 bp, Homo sapiens
gccctggtgccttct

SEQ ID NO: 1903425 - DNA, 15 bp, Homo sapiens
ccctggtgccttctt

SEQ ID NO: 1903426 - DNA, 15 bp, Homo sapiens
cctggtgccttcttt

SEQ ID NO: 1903427 - DNA, 15 bp, Homo sapiens
ctggtgccttctttt

SEQ ID NO: 1903428 - DNA, 15 bp, Homo sapiens
tggtgccttcttttt

SEQ ID NO: 1903429 - DNA, 15 bp, Homo sapiens
ggtgccttctttttt

SEQ ID NO: 1903430 - DNA, 15 bp, Homo sapiens
gtgccttcttttttt

SEQ ID NO: 1903431 - DNA, 15 bp, Homo sapiens
tgccttctttttttt

SEQ ID NO: 1903432 - DNA, 15 bp, Homo sapiens
gccttcttttttttt

SEQ ID NO: 1903433 - DNA, 15 bp, Homo sapiens
ctgagactacaggcg

SEQ ID NO: 1903434 - DNA, 15 bp, Homo sapiens
tgagactacaggcgc

SEQ ID NO: 1903435 - DNA, 15 bp, Homo sapiens
gagactacaggcgcc

SEQ ID NO: 1903436 - DNA, 15 bp, Homo sapiens
agactacaggcgccc

SEQ ID NO: 1903437 - DNA, 15 bp, Homo sapiens
ctggctaatttttga

SEQ ID NO: 1903438 - DNA, 15 bp, Homo sapiens
tggctaatttttgaa

SEQ ID NO: 1903439 - DNA, 15 bp, Homo sapiens
ggctaatttttgaat

SEQ ID NO: 1903440 - DNA, 15 bp, Homo sapiens
gctaatttttgaatt

SEQ ID NO: 1903441 - DNA, 15 bp, Homo sapiens
taatttttgaatttt

SEQ ID NO: 1903442 - DNA, 15 bp, Homo sapiens
aatttttgaattttt

SEQ ID NO: 1903443 - DNA, 15 bp, Homo sapiens
atttttgaattttta

SEQ ID NO: 1903444 - DNA, 15 bp, Homo sapiens
tttttgaatttttag

SEQ ID NO: 1903445 - DNA, 15 bp, Homo sapiens
aatttttagtagaga

SEQ ID NO: 1903446 - DNA, 15 bp, Homo sapiens
cagggtttcactata

SEQ ID NO: 1903447 - DNA, 15 bp, Homo sapiens
agggtttcactatat

SEQ ID NO: 1903448 - DNA, 15 bp, Homo sapiens
gggtttcactatatt

SEQ ID NO: 1903449 - DNA, 15 bp, Homo sapiens
gtttcactatattgg

SEQ ID NO: 1903450 - DNA, 15 bp, Homo sapiens
tttcactatattggc

SEQ ID NO: 1903451 - DNA, 15 bp, Homo sapiens
ttcactatattggct

SEQ ID NO: 1903452 - DNA, 15 bp, Homo sapiens
tcactatattggcta

SEQ ID NO: 1903453 - DNA, 15 bp, Homo sapiens
cactatattggctag

SEQ ID NO: 1903454 - DNA, 15 bp, Homo sapiens
actatattggctagg

SEQ ID NO: 1903455 - DNA, 15 bp, Homo sapiens
ctatattggctaggc

SEQ ID NO: 1903456 - DNA, 15 bp, Homo sapiens
tatattggctaggct

SEQ ID NO: 1903457 - DNA, 15 bp, Homo sapiens
atattggctaggctg

SEQ ID NO: 1903458 - DNA, 15 bp, Homo sapiens
tattggctaggctgg

SEQ ID NO: 1903459 - DNA, 15 bp, Homo sapiens
attggctaggctggt

SEQ ID NO: 1903460 - DNA, 15 bp, Homo sapiens
ttggctaggctggtc

SEQ ID NO: 1903461 - DNA, 15 bp, Homo sapiens
tggctaggctggtct

SEQ ID NO: 1903462 - DNA, 15 bp, Homo sapiens
ggctaggctggtctc

SEQ ID NO: 1903463 - DNA, 15 bp, Homo sapiens
gctaggctggtctca

SEQ ID NO: 1903464 - DNA, 15 bp, Homo sapiens
caaactcctgacctt

SEQ ID NO: 1903465 - DNA, 15 bp, Homo sapiens
aaactcctgaccttg

SEQ ID NO: 1903466 - DNA, 15 bp, Homo sapiens
cttgtgatccgccca

SEQ ID NO: 1903467 - DNA, 15 bp, Homo sapiens
ttgtgatccgcccac

SEQ ID NO: 1903468 - DNA, 15 bp, Homo sapiens
tgtgatccgcccacc

SEQ ID NO: 1903469 - DNA, 15 bp, Homo sapiens
tgatccgcccacctc

SEQ ID NO: 1903470 - DNA, 15 bp, Homo sapiens
gatccgcccacctca

SEQ ID NO: 1903471 - DNA, 15 bp, Homo sapiens
atccgcccacctcag

SEQ ID NO: 1903472 - DNA, 15 bp, Homo sapiens
tccgcccacctcagc

SEQ ID NO: 1903473 - DNA, 15 bp, Homo sapiens
ccgcccacctcagcc

SEQ ID NO: 1903474 - DNA, 15 bp, Homo sapiens
cgcccacctcagcct

SEQ ID NO: 1903475 - DNA, 15 bp, Homo sapiens
gggattataggtgtt

SEQ ID NO: 1903476 - DNA, 15 bp, Homo sapiens
ggattataggtgtta

SEQ ID NO: 1903477 - DNA, 15 bp, Homo sapiens
gattataggtgttag

SEQ ID NO: 1903478 - DNA, 15 bp, Homo sapiens
attataggtgttagc

SEQ ID NO: 1903479 - DNA, 15 bp, Homo sapiens
ttataggtgttagcc

SEQ ID NO: 1903480 - DNA, 15 bp, Homo sapiens
tataggtgttagcca

SEQ ID NO: 1903481 - DNA, 15 bp, Homo sapiens
ataggtgttagccac

SEQ ID NO: 1903482 - DNA, 15 bp, Homo sapiens
taggtgttagccact

SEQ ID NO: 1903483 - DNA, 15 bp, Homo sapiens
aggtgttagccactg

SEQ ID NO: 1903484 - DNA, 15 bp, Homo sapiens
ggtgttagccactgt

SEQ ID NO: 1903485 - DNA, 15 bp, Homo sapiens
gtgttagccactgtg

SEQ ID NO: 1903486 - DNA, 15 bp, Homo sapiens
tgttagccactgtgc

SEQ ID NO: 1903487 - DNA, 15 bp, Homo sapiens
gttagccactgtgcc

SEQ ID NO: 1903488 - DNA, 15 bp, Homo sapiens
ttagccactgtgccc

SEQ ID NO: 1903489 - DNA, 15 bp, Homo sapiens
tagccactgtgccca

SEQ ID NO: 1903490 - DNA, 15 bp, Homo sapiens
actgtgcccagcctg

SEQ ID NO: 1903491 - DNA, 15 bp, Homo sapiens
ctgtgcccagcctgg

SEQ ID NO: 1903492 - DNA, 15 bp, Homo sapiens
tgtgcccagcctggt

SEQ ID NO: 1903493 - DNA, 15 bp, Homo sapiens
gtgcccagcctggtg

SEQ ID NO: 1903494 - DNA, 15 bp, Homo sapiens
tgcccagcctggtgc

SEQ ID NO: 1903495 - DNA, 15 bp, Homo sapiens
gcccagcctggtgct

SEQ ID NO: 1903496 - DNA, 15 bp, Homo sapiens
cccagcctggtgctt

SEQ ID NO: 1903497 - DNA, 15 bp, Homo sapiens
ccagcctggtgcttt

SEQ ID NO: 1903498 - DNA, 15 bp, Homo sapiens
cagcctggtgcttta

SEQ ID NO: 1903499 - DNA, 15 bp, Homo sapiens
agcctggtgctttaa

SEQ ID NO: 1903500 - DNA, 15 bp, Homo sapiens
gcctggtgctttaat

SEQ ID NO: 1903501 - DNA, 15 bp, Homo sapiens
cctggtgctttaatt

SEQ ID NO: 1903502 - DNA, 15 bp, Homo sapiens
ctggtgctttaattt

SEQ ID NO: 1903503 - DNA, 15 bp, Homo sapiens
tggtgctttaatttt

SEQ ID NO: 1903504 - DNA, 15 bp, Homo sapiens
ggtgctttaatttta

SEQ ID NO: 1903505 - DNA, 15 bp, Homo sapiens
gtgctttaattttat

SEQ ID NO: 1903506 - DNA, 15 bp, Homo sapiens
tgctttaattttatg

SEQ ID NO: 1903507 - DNA, 15 bp, Homo sapiens
gctttaattttatgg

SEQ ID NO: 1903508 - DNA, 15 bp, Homo sapiens
ctttaattttatgga

SEQ ID NO: 1903509 - DNA, 15 bp, Homo sapiens
tttaattttatggaa

SEQ ID NO: 1903510 - DNA, 15 bp, Homo sapiens
ttaattttatggaaa

SEQ ID NO: 1903511 - DNA, 15 bp, Homo sapiens
taattttatggaaaa

SEQ ID NO: 1903512 - DNA, 15 bp, Homo sapiens
aattttatggaaaaa

SEQ ID NO: 1903513 - DNA, 15 bp, Homo sapiens
attttatggaaaaaa

SEQ ID NO: 1903514 - DNA, 15 bp, Homo sapiens
ttttatggaaaaaac

SEQ ID NO: 1903515 - DNA, 15 bp, Homo sapiens
tttatggaaaaaact

SEQ ID NO: 1903516 - DNA, 15 bp, Homo sapiens
ttatggaaaaaacta

SEQ ID NO: 1903517 - DNA, 15 bp, Homo sapiens
tatggaaaaaactac

SEQ ID NO: 1903518 - DNA, 15 bp, Homo sapiens
atggaaaaaactact

SEQ ID NO: 1903519 - DNA, 15 bp, Homo sapiens
tggaaaaaactacta

SEQ ID NO: 1903520 - DNA, 15 bp, Homo sapiens
ggaaaaaactactag

SEQ ID NO: 1903521 - DNA, 15 bp, Homo sapiens
gaaaaaactactagc

SEQ ID NO: 1903522 - DNA, 15 bp, Homo sapiens
aaaaaactactagct

SEQ ID NO: 1903523 - DNA, 15 bp, Homo sapiens
aaaaactactagctg

SEQ ID NO: 1903524 - DNA, 15 bp, Homo sapiens
aaaactactagctgg

SEQ ID NO: 1903525 - DNA, 15 bp, Homo sapiens
aaactactagctggt

SEQ ID NO: 1903526 - DNA, 15 bp, Homo sapiens
aactactagctggtt

SEQ ID NO: 1903527 - DNA, 15 bp, Homo sapiens
actactagctggttt

SEQ ID NO: 1903528 - DNA, 15 bp, Homo sapiens
ctactagctggtttc

SEQ ID NO: 1903529 - DNA, 15 bp, Homo sapiens
ggagttcaaggccac

SEQ ID NO: 1903530 - DNA, 15 bp, Homo sapiens
gagttcaaggccacc

SEQ ID NO: 1903531 - DNA, 15 bp, Homo sapiens
agttcaaggccaccc

SEQ ID NO: 1903532 - DNA, 15 bp, Homo sapiens
gttcaaggccaccct

SEQ ID NO: 1903533 - DNA, 15 bp, Homo sapiens
ttcaaggccaccctg

SEQ ID NO: 1903534 - DNA, 15 bp, Homo sapiens
tcaaggccaccctgg

SEQ ID NO: 1903535 - DNA, 15 bp, Homo sapiens
caaggccaccctggg

SEQ ID NO: 1903536 - DNA, 15 bp, Homo sapiens
aaggccaccctgggc

SEQ ID NO: 1903537 - DNA, 15 bp, Homo sapiens
aggccaccctgggca

SEQ ID NO: 1903538 - DNA, 15 bp, Homo sapiens
ggccaccctgggcaa

SEQ ID NO: 1903539 - DNA, 15 bp, Homo sapiens
gccaccctgggcaac

SEQ ID NO: 1903540 - DNA, 15 bp, Homo sapiens
accctgggcaacagg

SEQ ID NO: 1903541 - DNA, 15 bp, Homo sapiens
ccctgggcaacaggc

SEQ ID NO: 1903542 - DNA, 15 bp, Homo sapiens
cctgggcaacaggca

SEQ ID NO: 1903543 - DNA, 15 bp, Homo sapiens
ctgggcaacaggcaa

SEQ ID NO: 1903544 - DNA, 15 bp, Homo sapiens
tgggcaacaggcaaa

SEQ ID NO: 1903545 - DNA, 15 bp, Homo sapiens
gggcaacaggcaaaa

SEQ ID NO: 1903546 - DNA, 15 bp, Homo sapiens
ggcaacaggcaaaaa

SEQ ID NO: 1903547 - DNA, 15 bp, Homo sapiens
gcaacaggcaaaaaa

SEQ ID NO: 1903548 - DNA, 15 bp, Homo sapiens
caacaggcaaaaaat

SEQ ID NO: 1903549 - DNA, 15 bp, Homo sapiens
aacaggcaaaaaata

SEQ ID NO: 1903550 - DNA, 15 bp, Homo sapiens
acaggcaaaaaatag

SEQ ID NO: 1903551 - DNA, 15 bp, Homo sapiens
caggcaaaaaataga

SEQ ID NO: 1903552 - DNA, 15 bp, Homo sapiens
aggcaaaaaatagag

SEQ ID NO: 1903553 - DNA, 15 bp, Homo sapiens
ggcaaaaaatagaga

SEQ ID NO: 1903554 - DNA, 15 bp, Homo sapiens
gcaaaaaatagagac

SEQ ID NO: 1903555 - DNA, 15 bp, Homo sapiens
caaaaaatagagacc

SEQ ID NO: 1903556 - DNA, 15 bp, Homo sapiens
aaaaaatagagaccc

SEQ ID NO: 1903557 - DNA, 15 bp, Homo sapiens
aaaaatagagacccc

SEQ ID NO: 1903558 - DNA, 15 bp, Homo sapiens
aaaatagagacccca

SEQ ID NO: 1903559 - DNA, 15 bp, Homo sapiens
aaatagagaccccat

SEQ ID NO: 1903560 - DNA, 15 bp, Homo sapiens
aatagagaccccatc

SEQ ID NO: 1903561 - DNA, 15 bp, Homo sapiens
atagagaccccatct

SEQ ID NO: 1903562 - DNA, 15 bp, Homo sapiens
tagagaccccatctc

SEQ ID NO: 1903563 - DNA, 15 bp, Homo sapiens
agaccccatctctat

SEQ ID NO: 1903564 - DNA, 15 bp, Homo sapiens
gaccccatctctatt

SEQ ID NO: 1903565 - DNA, 15 bp, Homo sapiens
accccatctctattt

SEQ ID NO: 1903566 - DNA, 15 bp, Homo sapiens
ccccatctctatttt

SEQ ID NO: 1903567 - DNA, 15 bp, Homo sapiens
cccatctctattttt

SEQ ID NO: 1903568 - DNA, 15 bp, Homo sapiens
ccatctctatttttt

SEQ ID NO: 1903569 - DNA, 15 bp, Homo sapiens
catctctatttttta

SEQ ID NO: 1903570 - DNA, 15 bp, Homo sapiens
atctctattttttaa

SEQ ID NO: 1903571 - DNA, 15 bp, Homo sapiens
tctctattttttaaa

SEQ ID NO: 1903572 - DNA, 15 bp, Homo sapiens
ctctattttttaaaa

SEQ ID NO: 1903573 - DNA, 15 bp, Homo sapiens
tctattttttaaaaa

SEQ ID NO: 1903574 - DNA, 15 bp, Homo sapiens
ctattttttaaaaat

SEQ ID NO: 1903575 - DNA, 15 bp, Homo sapiens
tattttttaaaaata

SEQ ID NO: 1903576 - DNA, 15 bp, Homo sapiens
attttttaaaaataa

SEQ ID NO: 1903577 - DNA, 15 bp, Homo sapiens
ttttttaaaaataaa

SEQ ID NO: 1903578 - DNA, 15 bp, Homo sapiens
tttttaaaaataaaa

SEQ ID NO: 1903579 - DNA, 15 bp, Homo sapiens
ttttaaaaataaaat

SEQ ID NO: 1903580 - DNA, 15 bp, Homo sapiens
tttaaaaataaaata

SEQ ID NO: 1903581 - DNA, 15 bp, Homo sapiens
ttaaaaataaaataa

SEQ ID NO: 1903582 - DNA, 15 bp, Homo sapiens
aaaaataaaataaac

SEQ ID NO: 1903583 - DNA, 15 bp, Homo sapiens
aaaataaaataaact

SEQ ID NO: 1903584 - DNA, 15 bp, Homo sapiens
aaataaaataaactg

SEQ ID NO: 1903585 - DNA, 15 bp, Homo sapiens
aataaaataaactgg

SEQ ID NO: 1903586 - DNA, 15 bp, Homo sapiens
ataaaataaactggg

SEQ ID NO: 1903587 - DNA, 15 bp, Homo sapiens
taaaataaactggga

SEQ ID NO: 1903588 - DNA, 15 bp, Homo sapiens
aaaataaactgggag

SEQ ID NO: 1903589 - DNA, 15 bp, Homo sapiens
aaataaactgggaga

SEQ ID NO: 1903590 - DNA, 15 bp, Homo sapiens
aataaactgggagaa

SEQ ID NO: 1903591 - DNA, 15 bp, Homo sapiens
ataaactgggagaaa

SEQ ID NO: 1903592 - DNA, 15 bp, Homo sapiens
taaactgggagaaag

SEQ ID NO: 1903593 - DNA, 15 bp, Homo sapiens
aaactgggagaaaga

SEQ ID NO: 1903594 - DNA, 15 bp, Homo sapiens
aactgggagaaagaa

SEQ ID NO: 1903595 - DNA, 15 bp, Homo sapiens
actgggagaaagaag

SEQ ID NO: 1903596 - DNA, 15 bp, Homo sapiens
ctgggagaaagaagc

SEQ ID NO: 1903597 - DNA, 15 bp, Homo sapiens
tgggagaaagaagca

SEQ ID NO: 1903598 - DNA, 15 bp, Homo sapiens
gggagaaagaagcag

SEQ ID NO: 1903599 - DNA, 15 bp, Homo sapiens
ggagaaagaagcagg

SEQ ID NO: 1903600 - DNA, 15 bp, Homo sapiens
gagaaagaagcaggg

SEQ ID NO: 1903601 - DNA, 15 bp, Homo sapiens
agaaagaagcagggt

SEQ ID NO: 1903602 - DNA, 15 bp, Homo sapiens
gaaagaagcagggtc

SEQ ID NO: 1903603 - DNA, 15 bp, Homo sapiens
aaagaagcagggtcc

SEQ ID NO: 1903604 - DNA, 15 bp, Homo sapiens
aagaagcagggtcct

SEQ ID NO: 1903605 - DNA, 15 bp, Homo sapiens
agaagcagggtcctc

SEQ ID NO: 1903606 - DNA, 15 bp, Homo sapiens
gaagcagggtcctcc

SEQ ID NO: 1903607 - DNA, 15 bp, Homo sapiens
aagcagggtcctccc

SEQ ID NO: 1903608 - DNA, 15 bp, Homo sapiens
agcagggtcctcccc

SEQ ID NO: 1903609 - DNA, 15 bp, Homo sapiens
gcagggtcctcccca

SEQ ID NO: 1903610 - DNA, 15 bp, Homo sapiens
cagggtcctccccag

SEQ ID NO: 1903611 - DNA, 15 bp, Homo sapiens
agggtcctccccaga

SEQ ID NO: 1903612 - DNA, 15 bp, Homo sapiens
gggtcctccccagag

SEQ ID NO: 1903613 - DNA, 15 bp, Homo sapiens
ggtcctccccagagc

SEQ ID NO: 1903614 - DNA, 15 bp, Homo sapiens
gtcctccccagagca

SEQ ID NO: 1903615 - DNA, 15 bp, Homo sapiens
tcctccccagagcat

SEQ ID NO: 1903616 - DNA, 15 bp, Homo sapiens
cctccccagagcatc

SEQ ID NO: 1903617 - DNA, 15 bp, Homo sapiens
ctccccagagcatct

SEQ ID NO: 1903618 - DNA, 15 bp, Homo sapiens
tccccagagcatctt

SEQ ID NO: 1903619 - DNA, 15 bp, Homo sapiens
ccccagagcatcttt

SEQ ID NO: 1903620 - DNA, 15 bp, Homo sapiens
cccagagcatcttta

SEQ ID NO: 1903621 - DNA, 15 bp, Homo sapiens
ccagagcatctttat

SEQ ID NO: 1903622 - DNA, 15 bp, Homo sapiens
cagagcatctttatc

SEQ ID NO: 1903623 - DNA, 15 bp, Homo sapiens
agagcatctttatcc

SEQ ID NO: 1903624 - DNA, 15 bp, Homo sapiens
gagcatctttatccc

SEQ ID NO: 1903625 - DNA, 15 bp, Homo sapiens
agcatctttatccct

SEQ ID NO: 1903626 - DNA, 15 bp, Homo sapiens
gcatctttatcccta

SEQ ID NO: 1903627 - DNA, 15 bp, Homo sapiens
catctttatccctag

SEQ ID NO: 1903628 - DNA, 15 bp, Homo sapiens
atctttatccctagt

SEQ ID NO: 1903629 - DNA, 15 bp, Homo sapiens
tctttatccctagtc

SEQ ID NO: 1903630 - DNA, 15 bp, Homo sapiens
ctttatccctagtca

SEQ ID NO: 1903631 - DNA, 15 bp, Homo sapiens
tttatccctagtcac

SEQ ID NO: 1903632 - DNA, 15 bp, Homo sapiens
ttatccctagtcaca

SEQ ID NO: 1903633 - DNA, 15 bp, Homo sapiens
tatccctagtcacag

SEQ ID NO: 1903634 - DNA, 15 bp, Homo sapiens
atccctagtcacaga

SEQ ID NO: 1903635 - DNA, 15 bp, Homo sapiens
tccctagtcacagac

SEQ ID NO: 1903636 - DNA, 15 bp, Homo sapiens
ccctagtcacagacc

SEQ ID NO: 1903637 - DNA, 15 bp, Homo sapiens
cctagtcacagacct

SEQ ID NO: 1903638 - DNA, 15 bp, Homo sapiens
ctagtcacagacctg

SEQ ID NO: 1903639 - DNA, 15 bp, Homo sapiens
tagtcacagacctga

SEQ ID NO: 1903640 - DNA, 15 bp, Homo sapiens
agtcacagacctgac

SEQ ID NO: 1903641 - DNA, 15 bp, Homo sapiens
gtcacagacctgaca

SEQ ID NO: 1903642 - DNA, 15 bp, Homo sapiens
tcacagacctgacac

SEQ ID NO: 1903643 - DNA, 15 bp, Homo sapiens
cacagacctgacacc

SEQ ID NO: 1903644 - DNA, 15 bp, Homo sapiens
acagacctgacacct

SEQ ID NO: 1903645 - DNA, 15 bp, Homo sapiens
cagacctgacacctg

SEQ ID NO: 1903646 - DNA, 15 bp, Homo sapiens
agacctgacacctgt

SEQ ID NO: 1903647 - DNA, 15 bp, Homo sapiens
gacctgacacctgtg

SEQ ID NO: 1903648 - DNA, 15 bp, Homo sapiens
acctgacacctgtgt

SEQ ID NO: 1903649 - DNA, 15 bp, Homo sapiens
cctgacacctgtgtt

SEQ ID NO: 1903650 - DNA, 15 bp, Homo sapiens
ctgacacctgtgttg

SEQ ID NO: 1903651 - DNA, 15 bp, Homo sapiens
tgacacctgtgttgg

SEQ ID NO: 1903652 - DNA, 15 bp, Homo sapiens
gacacctgtgttggg

SEQ ID NO: 1903653 - DNA, 15 bp, Homo sapiens
acacctgtgttgggc

SEQ ID NO: 1903654 - DNA, 15 bp, Homo sapiens
cacctgtgttgggca

SEQ ID NO: 1903655 - DNA, 15 bp, Homo sapiens
acctgtgttgggcaa

SEQ ID NO: 1903656 - DNA, 15 bp, Homo sapiens
cctgtgttgggcaat

SEQ ID NO: 1903657 - DNA, 15 bp, Homo sapiens
ctgtgttgggcaatg

SEQ ID NO: 1903658 - DNA, 15 bp, Homo sapiens
tgtgttgggcaatgg

SEQ ID NO: 1903659 - DNA, 15 bp, Homo sapiens
gtgttgggcaatggc

SEQ ID NO: 1903660 - DNA, 15 bp, Homo sapiens
tgttgggcaatggct

SEQ ID NO: 1903661 - DNA, 15 bp, Homo sapiens
gttgggcaatggcta

SEQ ID NO: 1903662 - DNA, 15 bp, Homo sapiens
ttgggcaatggctac

SEQ ID NO: 1903663 - DNA, 15 bp, Homo sapiens
tgggcaatggctact

SEQ ID NO: 1903664 - DNA, 15 bp, Homo sapiens
gggcaatggctactt

SEQ ID NO: 1903665 - DNA, 15 bp, Homo sapiens
ggcaatggctacttc

SEQ ID NO: 1903666 - DNA, 15 bp, Homo sapiens
gcaatggctacttct

SEQ ID NO: 1903667 - DNA, 15 bp, Homo sapiens
caatggctacttcta

SEQ ID NO: 1903668 - DNA, 15 bp, Homo sapiens
aatggctacttctag

SEQ ID NO: 1903669 - DNA, 15 bp, Homo sapiens
atggctacttctaga

SEQ ID NO: 1903670 - DNA, 15 bp, Homo sapiens
tggctacttctagat

SEQ ID NO: 1903671 - DNA, 15 bp, Homo sapiens
ggctacttctagatt

SEQ ID NO: 1903672 - DNA, 15 bp, Homo sapiens
gctacttctagattg

SEQ ID NO: 1903673 - DNA, 15 bp, Homo sapiens
ctacttctagattgt

SEQ ID NO: 1903674 - DNA, 15 bp, Homo sapiens
tacttctagattgtt

SEQ ID NO: 1903675 - DNA, 15 bp, Homo sapiens
acttctagattgttt

SEQ ID NO: 1903676 - DNA, 15 bp, Homo sapiens
cttctagattgttta

SEQ ID NO: 1903677 - DNA, 15 bp, Homo sapiens
ttctagattgtttac

SEQ ID NO: 1903678 - DNA, 15 bp, Homo sapiens
tctagattgtttacc

SEQ ID NO: 1903679 - DNA, 15 bp, Homo sapiens
ctagattgtttaccc

SEQ ID NO: 1903680 - DNA, 15 bp, Homo sapiens
tagattgtttacccc

SEQ ID NO: 1903681 - DNA, 15 bp, Homo sapiens
agattgtttacccct

SEQ ID NO: 1903682 - DNA, 15 bp, Homo sapiens
gattgtttaccccta

SEQ ID NO: 1903683 - DNA, 15 bp, Homo sapiens
attgtttacccctac

SEQ ID NO: 1903684 - DNA, 15 bp, Homo sapiens
ttgtttacccctact

SEQ ID NO: 1903685 - DNA, 15 bp, Homo sapiens
tgtttacccctactg

SEQ ID NO: 1903686 - DNA, 15 bp, Homo sapiens
gtttacccctactgg

SEQ ID NO: 1903687 - DNA, 15 bp, Homo sapiens
tttacccctactggg

SEQ ID NO: 1903688 - DNA, 15 bp, Homo sapiens
ttacccctactggga

SEQ ID NO: 1903689 - DNA, 15 bp, Homo sapiens
tacccctactgggac

SEQ ID NO: 1903690 - DNA, 15 bp, Homo sapiens
acccctactgggact

SEQ ID NO: 1903691 - DNA, 15 bp, Homo sapiens
cccctactgggactt

SEQ ID NO: 1903692 - DNA, 15 bp, Homo sapiens
ccctactgggacttg

SEQ ID NO: 1903693 - DNA, 15 bp, Homo sapiens
cctactgggacttgt

SEQ ID NO: 1903694 - DNA, 15 bp, Homo sapiens
ctactgggacttgtg

SEQ ID NO: 1903695 - DNA, 15 bp, Homo sapiens
tactgggacttgtgg

SEQ ID NO: 1903696 - DNA, 15 bp, Homo sapiens
actgggacttgtggt

SEQ ID NO: 1903697 - DNA, 15 bp, Homo sapiens
ctgggacttgtggtg

SEQ ID NO: 1903698 - DNA, 15 bp, Homo sapiens
tgggacttgtggtga

SEQ ID NO: 1903699 - DNA, 15 bp, Homo sapiens
gggacttgtggtgaa

SEQ ID NO: 1903700 - DNA, 15 bp, Homo sapiens
ggacttgtggtgaac

SEQ ID NO: 1903701 - DNA, 15 bp, Homo sapiens
gacttgtggtgaaca

SEQ ID NO: 1903702 - DNA, 15 bp, Homo sapiens
acttgtggtgaacat

SEQ ID NO: 1903703 - DNA, 15 bp, Homo sapiens
cttgtggtgaacata

SEQ ID NO: 1903704 - DNA, 15 bp, Homo sapiens
ttgtggtgaacatat

SEQ ID NO: 1903705 - DNA, 15 bp, Homo sapiens
tgtggtgaacatatg

SEQ ID NO: 1903706 - DNA, 15 bp, Homo sapiens
gtggtgaacatatgc

SEQ ID NO: 1903707 - DNA, 15 bp, Homo sapiens
tggtgaacatatgca

SEQ ID NO: 1903708 - DNA, 15 bp, Homo sapiens
ggtgaacatatgcac

SEQ ID NO: 1903709 - DNA, 15 bp, Homo sapiens
gtgaacatatgcaca

SEQ ID NO: 1903710 - DNA, 15 bp, Homo sapiens
tgaacatatgcacac

SEQ ID NO: 1903711 - DNA, 15 bp, Homo sapiens
gaacatatgcacact

SEQ ID NO: 1903712 - DNA, 15 bp, Homo sapiens
aacatatgcacactt

SEQ ID NO: 1903713 - DNA, 15 bp, Homo sapiens
acatatgcacacttt

SEQ ID NO: 1903714 - DNA, 15 bp, Homo sapiens
catatgcacactttg

SEQ ID NO: 1903715 - DNA, 15 bp, Homo sapiens
atatgcacactttgg

SEQ ID NO: 1903716 - DNA, 15 bp, Homo sapiens
tatgcacactttggt

SEQ ID NO: 1903717 - DNA, 15 bp, Homo sapiens
atgcacactttggtt

SEQ ID NO: 1903718 - DNA, 15 bp, Homo sapiens
tgcacactttggttt

SEQ ID NO: 1903719 - DNA, 15 bp, Homo sapiens
gcacactttggttta

SEQ ID NO: 1903720 - DNA, 15 bp, Homo sapiens
cacactttggtttac

SEQ ID NO: 1903721 - DNA, 15 bp, Homo sapiens
acactttggtttaca

SEQ ID NO: 1903722 - DNA, 15 bp, Homo sapiens
cactttggtttacag

SEQ ID NO: 1903723 - DNA, 15 bp, Homo sapiens
actttggtttacagt

SEQ ID NO: 1903724 - DNA, 15 bp, Homo sapiens
ctttggtttacagtt

SEQ ID NO: 1903725 - DNA, 15 bp, Homo sapiens
tttggtttacagttg

SEQ ID NO: 1903726 - DNA, 15 bp, Homo sapiens
ttggtttacagttgg

SEQ ID NO: 1903727 - DNA, 15 bp, Homo sapiens
tggtttacagttggg

SEQ ID NO: 1903728 - DNA, 15 bp, Homo sapiens
ggtttacagttggga

SEQ ID NO: 1903729 - DNA, 15 bp, Homo sapiens
gtttacagttgggac

SEQ ID NO: 1903730 - DNA, 15 bp, Homo sapiens
tttacagttgggacc

SEQ ID NO: 1903731 - DNA, 15 bp, Homo sapiens
ttacagttgggaccc

SEQ ID NO: 1903732 - DNA, 15 bp, Homo sapiens
tacagttgggacccc

SEQ ID NO: 1903733 - DNA, 15 bp, Homo sapiens
acagttgggacccct

SEQ ID NO: 1903734 - DNA, 15 bp, Homo sapiens
cagttgggacccctg

SEQ ID NO: 1903735 - DNA, 15 bp, Homo sapiens
agttgggacccctga

SEQ ID NO: 1903736 - DNA, 15 bp, Homo sapiens
gttgggacccctgat

SEQ ID NO: 1903737 - DNA, 15 bp, Homo sapiens
ttgggacccctgatt

SEQ ID NO: 1903738 - DNA, 15 bp, Homo sapiens
tgggacccctgattt

SEQ ID NO: 1903739 - DNA, 15 bp, Homo sapiens
gggacccctgatttt

SEQ ID NO: 1903740 - DNA, 15 bp, Homo sapiens
ggacccctgatttta

SEQ ID NO: 1903741 - DNA, 15 bp, Homo sapiens
gacccctgattttag

SEQ ID NO: 1903742 - DNA, 15 bp, Homo sapiens
acccctgattttagc

SEQ ID NO: 1903743 - DNA, 15 bp, Homo sapiens
cccctgattttagca

SEQ ID NO: 1903744 - DNA, 15 bp, Homo sapiens
ccctgattttagcag

SEQ ID NO: 1903745 - DNA, 15 bp, Homo sapiens
ctgattttagcagga

SEQ ID NO: 1903746 - DNA, 15 bp, Homo sapiens
tgattttagcaggat

SEQ ID NO: 1903747 - DNA, 15 bp, Homo sapiens
gattttagcaggatg

SEQ ID NO: 1903748 - DNA, 15 bp, Homo sapiens
attttagcaggatgg

SEQ ID NO: 1903749 - DNA, 15 bp, Homo sapiens
ttttagcaggatggc

SEQ ID NO: 1903750 - DNA, 15 bp, Homo sapiens
tttagcaggatggcc

SEQ ID NO: 1903751 - DNA, 15 bp, Homo sapiens
ttagcaggatggccc

SEQ ID NO: 1903752 - DNA, 15 bp, Homo sapiens
tagcaggatggccca

SEQ ID NO: 1903753 - DNA, 15 bp, Homo sapiens
agcaggatggcccaa

SEQ ID NO: 1903754 - DNA, 15 bp, Homo sapiens
gcaggatggcccaat

SEQ ID NO: 1903755 - DNA, 15 bp, Homo sapiens
caggatggcccaatg

SEQ ID NO: 1903756 - DNA, 15 bp, Homo sapiens
aggatggcccaatgg

SEQ ID NO: 1903757 - DNA, 15 bp, Homo sapiens
ggatggcccaatgga

SEQ ID NO: 1903758 - DNA, 15 bp, Homo sapiens
gatggcccaatggaa

SEQ ID NO: 1903759 - DNA, 15 bp, Homo sapiens
atggcccaatggaat

SEQ ID NO: 1903760 - DNA, 15 bp, Homo sapiens
tggcccaatggaatc

SEQ ID NO: 1903761 - DNA, 15 bp, Homo sapiens
ggcccaatggaatca

SEQ ID NO: 1903762 - DNA, 15 bp, Homo sapiens
gcccaatggaatcag

SEQ ID NO: 1903763 - DNA, 15 bp, Homo sapiens
cccaatggaatcagc

SEQ ID NO: 1903764 - DNA, 15 bp, Homo sapiens
ccaatggaatcagct

SEQ ID NO: 1903765 - DNA, 15 bp, Homo sapiens
caatggaatcagcta

SEQ ID NO: 1903766 - DNA, 15 bp, Homo sapiens
aatggaatcagctac

SEQ ID NO: 1903767 - DNA, 15 bp, Homo sapiens
atggaatcagctaca

SEQ ID NO: 1903768 - DNA, 15 bp, Homo sapiens
tggaatcagctacag

SEQ ID NO: 1903769 - DNA, 15 bp, Homo sapiens
ggaatcagctacagc

SEQ ID NO: 1903770 - DNA, 15 bp, Homo sapiens
gaatcagctacagca

SEQ ID NO: 1903771 - DNA, 15 bp, Homo sapiens
aatcagctacagcag

SEQ ID NO: 1903772 - DNA, 15 bp, Homo sapiens
atcagctacagcagc

SEQ ID NO: 1903773 - DNA, 15 bp, Homo sapiens
tcagctacagcagct

SEQ ID NO: 1903774 - DNA, 15 bp, Homo sapiens
cagctacagcagctt

SEQ ID NO: 1903775 - DNA, 15 bp, Homo sapiens
agctacagcagcttg

SEQ ID NO: 1903776 - DNA, 15 bp, Homo sapiens
gctacagcagcttga

SEQ ID NO: 1903777 - DNA, 15 bp, Homo sapiens
ctacagcagcttgac

SEQ ID NO: 1903778 - DNA, 15 bp, Homo sapiens
tacagcagcttgaca

SEQ ID NO: 1903779 - DNA, 15 bp, Homo sapiens
acagcagcttgacac

SEQ ID NO: 1903780 - DNA, 15 bp, Homo sapiens
cagcagcttgacaca

SEQ ID NO: 1903781 - DNA, 15 bp, Homo sapiens
agcagcttgacacac

SEQ ID NO: 1903782 - DNA, 15 bp, Homo sapiens
gcagcttgacacacg

SEQ ID NO: 1903783 - DNA, 15 bp, Homo sapiens
cagcttgacacacgg

SEQ ID NO: 1903784 - DNA, 15 bp, Homo sapiens
agcttgacacacggt

SEQ ID NO: 1903785 - DNA, 15 bp, Homo sapiens
gcttgacacacggta

SEQ ID NO: 1903786 - DNA, 15 bp, Homo sapiens
cttgacacacggtac

SEQ ID NO: 1903787 - DNA, 15 bp, Homo sapiens
ttgacacacggtacc

SEQ ID NO: 1903788 - DNA, 15 bp, Homo sapiens
tgacacacggtacct

SEQ ID NO: 1903789 - DNA, 15 bp, Homo sapiens
gacacacggtacctg

SEQ ID NO: 1903790 - DNA, 15 bp, Homo sapiens
acacacggtacctgg

SEQ ID NO: 1903791 - DNA, 15 bp, Homo sapiens
cacacggtacctgga

SEQ ID NO: 1903792 - DNA, 15 bp, Homo sapiens
acacggtacctggag

SEQ ID NO: 1903793 - DNA, 15 bp, Homo sapiens
cacggtacctggagc

SEQ ID NO: 1903794 - DNA, 15 bp, Homo sapiens
acggtacctggagca

SEQ ID NO: 1903795 - DNA, 15 bp, Homo sapiens
cggtacctggagcag

SEQ ID NO: 1903796 - DNA, 15 bp, Homo sapiens
ggtacctggagcagc

SEQ ID NO: 1903797 - DNA, 15 bp, Homo sapiens
gtacctggagcagct

SEQ ID NO: 1903798 - DNA, 15 bp, Homo sapiens
tacctggagcagctc

SEQ ID NO: 1903799 - DNA, 15 bp, Homo sapiens
acctggagcagctcc

SEQ ID NO: 1903800 - DNA, 15 bp, Homo sapiens
cctggagcagctcca

SEQ ID NO: 1903801 - DNA, 15 bp, Homo sapiens
ctggagcagctccat

SEQ ID NO: 1903802 - DNA, 15 bp, Homo sapiens
tggagcagctccatc

SEQ ID NO: 1903803 - DNA, 15 bp, Homo sapiens
ggagcagctccatca

SEQ ID NO: 1903804 - DNA, 15 bp, Homo sapiens
gagcagctccatcag

SEQ ID NO: 1903805 - DNA, 15 bp, Homo sapiens
agcagctccatcagc

SEQ ID NO: 1903806 - DNA, 15 bp, Homo sapiens
gcagctccatcagct

SEQ ID NO: 1903807 - DNA, 15 bp, Homo sapiens
cagctccatcagctc

SEQ ID NO: 1903808 - DNA, 15 bp, Homo sapiens
agctccatcagctct

SEQ ID NO: 1903809 - DNA, 15 bp, Homo sapiens
gctccatcagctcta

SEQ ID NO: 1903810 - DNA, 15 bp, Homo sapiens
ctccatcagctctac

SEQ ID NO: 1903811 - DNA, 15 bp, Homo sapiens
tccatcagctctaca

SEQ ID NO: 1903812 - DNA, 15 bp, Homo sapiens
ccatcagctctacag

SEQ ID NO: 1903813 - DNA, 15 bp, Homo sapiens
catcagctctacagt

SEQ ID NO: 1903814 - DNA, 15 bp, Homo sapiens
atcagctctacagtg

SEQ ID NO: 1903815 - DNA, 15 bp, Homo sapiens
tcagctctacagtga

SEQ ID NO: 1903816 - DNA, 15 bp, Homo sapiens
cagctctacagtgac

SEQ ID NO: 1903817 - DNA, 15 bp, Homo sapiens
agctctacagtgaca

SEQ ID NO: 1903818 - DNA, 15 bp, Homo sapiens
gctctacagtgacag

SEQ ID NO: 1903819 - DNA, 15 bp, Homo sapiens
ctctacagtgacagc

SEQ ID NO: 1903820 - DNA, 15 bp, Homo sapiens
tctacagtgacagct

SEQ ID NO: 1903821 - DNA, 15 bp, Homo sapiens
ctacagtgacagctt

SEQ ID NO: 1903822 - DNA, 15 bp, Homo sapiens
tacagtgacagcttc

SEQ ID NO: 1903823 - DNA, 15 bp, Homo sapiens
acagtgacagcttcc

SEQ ID NO: 1903824 - DNA, 15 bp, Homo sapiens
cagtgacagcttccc

SEQ ID NO: 1903825 - DNA, 15 bp, Homo sapiens
agtgacagcttccca

SEQ ID NO: 1903826 - DNA, 15 bp, Homo sapiens
gtgacagcttcccaa

SEQ ID NO: 1903827 - DNA, 15 bp, Homo sapiens
gacagcttcccaatg

SEQ ID NO: 1903828 - DNA, 15 bp, Homo sapiens
acagcttcccaatgg

SEQ ID NO: 1903829 - DNA, 15 bp, Homo sapiens
cagcttcccaatgga

SEQ ID NO: 1903830 - DNA, 15 bp, Homo sapiens
agcttcccaatggag

SEQ ID NO: 1903831 - DNA, 15 bp, Homo sapiens
gcttcccaatggagc

SEQ ID NO: 1903832 - DNA, 15 bp, Homo sapiens
cttcccaatggagct

SEQ ID NO: 1903833 - DNA, 15 bp, Homo sapiens
ttcccaatggagctg

SEQ ID NO: 1903834 - DNA, 15 bp, Homo sapiens
tcccaatggagctgc

SEQ ID NO: 1903835 - DNA, 15 bp, Homo sapiens
cccaatggagctgcg

SEQ ID NO: 1903836 - DNA, 15 bp, Homo sapiens
ccaatggagctgcgg

SEQ ID NO: 1903837 - DNA, 15 bp, Homo sapiens
caatggagctgcggc

SEQ ID NO: 1903838 - DNA, 15 bp, Homo sapiens
aatggagctgcggca

SEQ ID NO: 1903839 - DNA, 15 bp, Homo sapiens
atggagctgcggcag

SEQ ID NO: 1903840 - DNA, 15 bp, Homo sapiens
ggagctgcggcagtt

SEQ ID NO: 1903841 - DNA, 15 bp, Homo sapiens
gagctgcggcagttt

SEQ ID NO: 1903842 - DNA, 15 bp, Homo sapiens
agctgcggcagtttc

SEQ ID NO: 1903843 - DNA, 15 bp, Homo sapiens
gctgcggcagtttct

SEQ ID NO: 1903844 - DNA, 15 bp, Homo sapiens
ctgcggcagtttctg

SEQ ID NO: 1903845 - DNA, 15 bp, Homo sapiens
tgcggcagtttctgg

SEQ ID NO: 1903846 - DNA, 15 bp, Homo sapiens
gcggcagtttctggc

SEQ ID NO: 1903847 - DNA, 15 bp, Homo sapiens
cggcagtttctggcc

SEQ ID NO: 1903848 - DNA, 15 bp, Homo sapiens
ggcagtttctggccc

SEQ ID NO: 1903849 - DNA, 15 bp, Homo sapiens
gcagtttctggcccc

SEQ ID NO: 1903850 - DNA, 15 bp, Homo sapiens
cagtttctggcccct

SEQ ID NO: 1903851 - DNA, 15 bp, Homo sapiens
agtttctggcccctt

SEQ ID NO: 1903852 - DNA, 15 bp, Homo sapiens
gtttctggccccttg

SEQ ID NO: 1903853 - DNA, 15 bp, Homo sapiens
tttctggccccttgg

SEQ ID NO: 1903854 - DNA, 15 bp, Homo sapiens
ttctggccccttgga

SEQ ID NO: 1903855 - DNA, 15 bp, Homo sapiens
tctggccccttggat

SEQ ID NO: 1903856 - DNA, 15 bp, Homo sapiens
ctggccccttggatt

SEQ ID NO: 1903857 - DNA, 15 bp, Homo sapiens
tggccccttggattg

SEQ ID NO: 1903858 - DNA, 15 bp, Homo sapiens
ggccccttggattga

SEQ ID NO: 1903859 - DNA, 15 bp, Homo sapiens
gccccttggattgag

SEQ ID NO: 1903860 - DNA, 15 bp, Homo sapiens
ccccttggattgaga

SEQ ID NO: 1903861 - DNA, 15 bp, Homo sapiens
cccttggattgagag

SEQ ID NO: 1903862 - DNA, 15 bp, Homo sapiens
ccttggattgagagt

SEQ ID NO: 1903863 - DNA, 15 bp, Homo sapiens
cttggattgagagtc

SEQ ID NO: 1903864 - DNA, 15 bp, Homo sapiens
ttggattgagagtca

SEQ ID NO: 1903865 - DNA, 15 bp, Homo sapiens
tggattgagagtcaa

SEQ ID NO: 1903866 - DNA, 15 bp, Homo sapiens
ggattgagagtcaag

SEQ ID NO: 1903867 - DNA, 15 bp, Homo sapiens
gattgagagtcaaga

SEQ ID NO: 1903868 - DNA, 15 bp, Homo sapiens
attgagagtcaagat

SEQ ID NO: 1903869 - DNA, 15 bp, Homo sapiens
ttgagagtcaagatt

SEQ ID NO: 1903870 - DNA, 15 bp, Homo sapiens
tgagagtcaagattg

SEQ ID NO: 1903871 - DNA, 15 bp, Homo sapiens
gagagtcaagattgg

SEQ ID NO: 1903872 - DNA, 15 bp, Homo sapiens
agagtcaagattggt

SEQ ID NO: 1903873 - DNA, 15 bp, Homo sapiens
gagtcaagattggta

SEQ ID NO: 1903874 - DNA, 15 bp, Homo sapiens
agtcaagattggtaa

SEQ ID NO: 1903875 - DNA, 15 bp, Homo sapiens
gtcaagattggtaag

SEQ ID NO: 1903876 - DNA, 15 bp, Homo sapiens
tcaagattggtaagt

SEQ ID NO: 1903877 - DNA, 15 bp, Homo sapiens
caagattggtaagtc

SEQ ID NO: 1903878 - DNA, 15 bp, Homo sapiens
aagattggtaagtcc

SEQ ID NO: 1903879 - DNA, 15 bp, Homo sapiens
agattggtaagtcct

SEQ ID NO: 1903880 - DNA, 15 bp, Homo sapiens
gattggtaagtcctt

SEQ ID NO: 1903881 - DNA, 15 bp, Homo sapiens
attggtaagtccttc

SEQ ID NO: 1903882 - DNA, 15 bp, Homo sapiens
ttggtaagtccttct

SEQ ID NO: 1903883 - DNA, 15 bp, Homo sapiens
tggtaagtccttctt

SEQ ID NO: 1903884 - DNA, 15 bp, Homo sapiens
ggtaagtccttctta

SEQ ID NO: 1903885 - DNA, 15 bp, Homo sapiens
gtaagtccttcttaa

SEQ ID NO: 1903886 - DNA, 15 bp, Homo sapiens
taagtccttcttaag

SEQ ID NO: 1903887 - DNA, 15 bp, Homo sapiens
aagtccttcttaagt

SEQ ID NO: 1903888 - DNA, 15 bp, Homo sapiens
agtccttcttaagtg

SEQ ID NO: 1903889 - DNA, 15 bp, Homo sapiens
gtccttcttaagtga

SEQ ID NO: 1903890 - DNA, 15 bp, Homo sapiens
tccttcttaagtgac

SEQ ID NO: 1903891 - DNA, 15 bp, Homo sapiens
ccttcttaagtgact

SEQ ID NO: 1903892 - DNA, 15 bp, Homo sapiens
cttcttaagtgactc

SEQ ID NO: 1903893 - DNA, 15 bp, Homo sapiens
ttcttaagtgactct

SEQ ID NO: 1903894 - DNA, 15 bp, Homo sapiens
tcttaagtgactctc

SEQ ID NO: 1903895 - DNA, 15 bp, Homo sapiens
cttaagtgactctcc

SEQ ID NO: 1903896 - DNA, 15 bp, Homo sapiens
ttaagtgactctcca

SEQ ID NO: 1903897 - DNA, 15 bp, Homo sapiens
taagtgactctccaa

SEQ ID NO: 1903898 - DNA, 15 bp, Homo sapiens
aagtgactctccaaa

SEQ ID NO: 1903899 - DNA, 15 bp, Homo sapiens
agtgactctccaaat

SEQ ID NO: 1903900 - DNA, 15 bp, Homo sapiens
gtgactctccaaatt

SEQ ID NO: 1903901 - DNA, 15 bp, Homo sapiens
tgactctccaaattg

SEQ ID NO: 1903902 - DNA, 15 bp, Homo sapiens
gactctccaaattgt

SEQ ID NO: 1903903 - DNA, 15 bp, Homo sapiens
actctccaaattgtt

SEQ ID NO: 1903904 - DNA, 15 bp, Homo sapiens
ctctccaaattgtta

SEQ ID NO: 1903905 - DNA, 15 bp, Homo sapiens
tctccaaattgttag

SEQ ID NO: 1903906 - DNA, 15 bp, Homo sapiens
ctccaaattgttagg

SEQ ID NO: 1903907 - DNA, 15 bp, Homo sapiens
tccaaattgttaggt

SEQ ID NO: 1903908 - DNA, 15 bp, Homo sapiens
ccaaattgttaggtt

SEQ ID NO: 1903909 - DNA, 15 bp, Homo sapiens
caaattgttaggttt

SEQ ID NO: 1903910 - DNA, 15 bp, Homo sapiens
aaattgttaggtttc

SEQ ID NO: 1903911 - DNA, 15 bp, Homo sapiens
aattgttaggtttca

SEQ ID NO: 1903912 - DNA, 15 bp, Homo sapiens
attgttaggtttcag

SEQ ID NO: 1903913 - DNA, 15 bp, Homo sapiens
ttgttaggtttcagt

SEQ ID NO: 1903914 - DNA, 15 bp, Homo sapiens
tgttaggtttcagtt

SEQ ID NO: 1903915 - DNA, 15 bp, Homo sapiens
gttaggtttcagttt

SEQ ID NO: 1903916 - DNA, 15 bp, Homo sapiens
ttaggtttcagtttg

SEQ ID NO: 1903917 - DNA, 15 bp, Homo sapiens
taggtttcagtttga

SEQ ID NO: 1903918 - DNA, 15 bp, Homo sapiens
aggtttcagtttgag

SEQ ID NO: 1903919 - DNA, 15 bp, Homo sapiens
ggtttcagtttgagt

SEQ ID NO: 1903920 - DNA, 15 bp, Homo sapiens
gtttcagtttgagtc

SEQ ID NO: 1903921 - DNA, 15 bp, Homo sapiens
tttcagtttgagtca

SEQ ID NO: 1903922 - DNA, 15 bp, Homo sapiens
ttcagtttgagtcaa

SEQ ID NO: 1903923 - DNA, 15 bp, Homo sapiens
tcagtttgagtcaag

SEQ ID NO: 1903924 - DNA, 15 bp, Homo sapiens
cagtttgagtcaaga

SEQ ID NO: 1903925 - DNA, 15 bp, Homo sapiens
agtttgagtcaagag

SEQ ID NO: 1903926 - DNA, 15 bp, Homo sapiens
gtttgagtcaagaga

SEQ ID NO: 1903927 - DNA, 15 bp, Homo sapiens
tttgagtcaagagac

SEQ ID NO: 1903928 - DNA, 15 bp, Homo sapiens
ttgagtcaagagaca

SEQ ID NO: 1903929 - DNA, 15 bp, Homo sapiens
tgagtcaagagacat

SEQ ID NO: 1903930 - DNA, 15 bp, Homo sapiens
gagtcaagagacatg

SEQ ID NO: 1903931 - DNA, 15 bp, Homo sapiens
agtcaagagacatga

SEQ ID NO: 1903932 - DNA, 15 bp, Homo sapiens
gtcaagagacatgaa

SEQ ID NO: 1903933 - DNA, 15 bp, Homo sapiens
tcaagagacatgaac

SEQ ID NO: 1903934 - DNA, 15 bp, Homo sapiens
caagagacatgaact

SEQ ID NO: 1903935 - DNA, 15 bp, Homo sapiens
aagagacatgaactc

SEQ ID NO: 1903936 - DNA, 15 bp, Homo sapiens
agagacatgaactct

SEQ ID NO: 1903937 - DNA, 15 bp, Homo sapiens
gagacatgaactctt

SEQ ID NO: 1903938 - DNA, 15 bp, Homo sapiens
agacatgaactctta

SEQ ID NO: 1903939 - DNA, 15 bp, Homo sapiens
gacatgaactcttaa

SEQ ID NO: 1903940 - DNA, 15 bp, Homo sapiens
acatgaactcttaat

SEQ ID NO: 1903941 - DNA, 15 bp, Homo sapiens
catgaactcttaatg

SEQ ID NO: 1903942 - DNA, 15 bp, Homo sapiens
atgaactcttaatgt

SEQ ID NO: 1903943 - DNA, 15 bp, Homo sapiens
tgaactcttaatgtc

SEQ ID NO: 1903944 - DNA, 15 bp, Homo sapiens
gaactcttaatgtca

SEQ ID NO: 1903945 - DNA, 15 bp, Homo sapiens
aactcttaatgtcat

SEQ ID NO: 1903946 - DNA, 15 bp, Homo sapiens
actcttaatgtcatg

SEQ ID NO: 1903947 - DNA, 15 bp, Homo sapiens
ctcttaatgtcatgc

SEQ ID NO: 1903948 - DNA, 15 bp, Homo sapiens
tcttaatgtcatgcc

SEQ ID NO: 1903949 - DNA, 15 bp, Homo sapiens
cttaatgtcatgcct

SEQ ID NO: 1903950 - DNA, 15 bp, Homo sapiens
ttaatgtcatgcctt

SEQ ID NO: 1903951 - DNA, 15 bp, Homo sapiens
taatgtcatgccttg

SEQ ID NO: 1903952 - DNA, 15 bp, Homo sapiens
aatgtcatgccttgc

SEQ ID NO: 1903953 - DNA, 15 bp, Homo sapiens
atgtcatgccttgct

SEQ ID NO: 1903954 - DNA, 15 bp, Homo sapiens
tgtcatgccttgctg

SEQ ID NO: 1903955 - DNA, 15 bp, Homo sapiens
gtcatgccttgctgt

SEQ ID NO: 1903956 - DNA, 15 bp, Homo sapiens
tcatgccttgctgtt

SEQ ID NO: 1903957 - DNA, 15 bp, Homo sapiens
catgccttgctgttc

SEQ ID NO: 1903958 - DNA, 15 bp, Homo sapiens
atgccttgctgttcc

SEQ ID NO: 1903959 - DNA, 15 bp, Homo sapiens
tgccttgctgttcca

SEQ ID NO: 1903960 - DNA, 15 bp, Homo sapiens
gccttgctgttccat

SEQ ID NO: 1903961 - DNA, 15 bp, Homo sapiens
ccttgctgttccatt

SEQ ID NO: 1903962 - DNA, 15 bp, Homo sapiens
cttgctgttccatta

SEQ ID NO: 1903963 - DNA, 15 bp, Homo sapiens
ttgctgttccattaa

SEQ ID NO: 1903964 - DNA, 15 bp, Homo sapiens
tgctgttccattaaa

SEQ ID NO: 1903965 - DNA, 15 bp, Homo sapiens
gctgttccattaaaa

SEQ ID NO: 1903966 - DNA, 15 bp, Homo sapiens
tgttccattaaaaaa

SEQ ID NO: 1903967 - DNA, 15 bp, Homo sapiens
gttccattaaaaaat

SEQ ID NO: 1903968 - DNA, 15 bp, Homo sapiens
ttccattaaaaaatg

SEQ ID NO: 1903969 - DNA, 15 bp, Homo sapiens
tccattaaaaaatgt

SEQ ID NO: 1903970 - DNA, 15 bp, Homo sapiens
ccattaaaaaatgta

SEQ ID NO: 1903971 - DNA, 15 bp, Homo sapiens
cattaaaaaatgtat

SEQ ID NO: 1903972 - DNA, 15 bp, Homo sapiens
attaaaaaatgtatg

SEQ ID NO: 1903973 - DNA, 15 bp, Homo sapiens
ttaaaaaatgtatgg

SEQ ID NO: 1903974 - DNA, 15 bp, Homo sapiens
taaaaaatgtatggg

SEQ ID NO: 1903975 - DNA, 15 bp, Homo sapiens
aaaaaatgtatgggt

SEQ ID NO: 1903976 - DNA, 15 bp, Homo sapiens
aaaaatgtatgggta

SEQ ID NO: 1903977 - DNA, 15 bp, Homo sapiens
aaaatgtatgggtac

SEQ ID NO: 1903978 - DNA, 15 bp, Homo sapiens
aaatgtatgggtaca

SEQ ID NO: 1903979 - DNA, 15 bp, Homo sapiens
aatgtatgggtacag

SEQ ID NO: 1903980 - DNA, 15 bp, Homo sapiens
atgtatgggtacagg

SEQ ID NO: 1903981 - DNA, 15 bp, Homo sapiens
tgtatgggtacaggt

SEQ ID NO: 1903982 - DNA, 15 bp, Homo sapiens
gtatgggtacaggtg

SEQ ID NO: 1903983 - DNA, 15 bp, Homo sapiens
tatgggtacaggtga

SEQ ID NO: 1903984 - DNA, 15 bp, Homo sapiens
atgggtacaggtgat

SEQ ID NO: 1903985 - DNA, 15 bp, Homo sapiens
tgggtacaggtgatg

SEQ ID NO: 1903986 - DNA, 15 bp, Homo sapiens
gggtacaggtgatgg

SEQ ID NO: 1903987 - DNA, 15 bp, Homo sapiens
ggtacaggtgatggg

SEQ ID NO: 1903988 - DNA, 15 bp, Homo sapiens
gtacaggtgatgggg

SEQ ID NO: 1903989 - DNA, 15 bp, Homo sapiens
tacaggtgatgggga

SEQ ID NO: 1903990 - DNA, 15 bp, Homo sapiens
acaggtgatggggaa

SEQ ID NO: 1903991 - DNA, 15 bp, Homo sapiens
caggtgatggggaaa

SEQ ID NO: 1903992 - DNA, 15 bp, Homo sapiens
aggtgatggggaaaa

SEQ ID NO: 1903993 - DNA, 15 bp, Homo sapiens
ggtgatggggaaaat

SEQ ID NO: 1903994 - DNA, 15 bp, Homo sapiens
gtgatggggaaaatg

SEQ ID NO: 1903995 - DNA, 15 bp, Homo sapiens
tgatggggaaaatga

SEQ ID NO: 1903996 - DNA, 15 bp, Homo sapiens
gatggggaaaatgag

SEQ ID NO: 1903997 - DNA, 15 bp, Homo sapiens
atggggaaaatgaga

SEQ ID NO: 1903998 - DNA, 15 bp, Homo sapiens
tggggaaaatgagat

SEQ ID NO: 1903999 - DNA, 15 bp, Homo sapiens
ggggaaaatgagatc

SEQ ID NO: 1904000 - DNA, 15 bp, Homo sapiens
gggaaaatgagatca

SEQ ID NO: 1904001 - DNA, 15 bp, Homo sapiens
ggaaaatgagatcag

SEQ ID NO: 1904002 - DNA, 15 bp, Homo sapiens
gaaaatgagatcagg

SEQ ID NO: 1904003 - DNA, 15 bp, Homo sapiens
aaaatgagatcagga

SEQ ID NO: 1904004 - DNA, 15 bp, Homo sapiens
aaatgagatcaggag

SEQ ID NO: 1904005 - DNA, 15 bp, Homo sapiens
aatgagatcaggaga

SEQ ID NO: 1904006 - DNA, 15 bp, Homo sapiens
atgagatcaggagat

SEQ ID NO: 1904007 - DNA, 15 bp, Homo sapiens
tgagatcaggagata

SEQ ID NO: 1904008 - DNA, 15 bp, Homo sapiens
gagatcaggagataa

SEQ ID NO: 1904009 - DNA, 15 bp, Homo sapiens
agatcaggagataaa

SEQ ID NO: 1904010 - DNA, 15 bp, Homo sapiens
gatcaggagataaag

SEQ ID NO: 1904011 - DNA, 15 bp, Homo sapiens
atcaggagataaagg

SEQ ID NO: 1904012 - DNA, 15 bp, Homo sapiens
tcaggagataaaggg

SEQ ID NO: 1904013 - DNA, 15 bp, Homo sapiens
caggagataaagggg

SEQ ID NO: 1904014 - DNA, 15 bp, Homo sapiens
aggagataaaggggc

SEQ ID NO: 1904015 - DNA, 15 bp, Homo sapiens
ggagataaaggggca

SEQ ID NO: 1904016 - DNA, 15 bp, Homo sapiens
gagataaaggggcac

SEQ ID NO: 1904017 - DNA, 15 bp, Homo sapiens
agataaaggggcacc

SEQ ID NO: 1904018 - DNA, 15 bp, Homo sapiens
gataaaggggcaccc

SEQ ID NO: 1904019 - DNA, 15 bp, Homo sapiens
ataaaggggcaccct

SEQ ID NO: 1904020 - DNA, 15 bp, Homo sapiens
taaaggggcaccctt

SEQ ID NO: 1904021 - DNA, 15 bp, Homo sapiens
aaaggggcacccttt

SEQ ID NO: 1904022 - DNA, 15 bp, Homo sapiens
aaggggcaccctttg

SEQ ID NO: 1904023 - DNA, 15 bp, Homo sapiens
aggggcaccctttgg

SEQ ID NO: 1904024 - DNA, 15 bp, Homo sapiens
ggggcaccctttggt

SEQ ID NO: 1904025 - DNA, 15 bp, Homo sapiens
gggcaccctttggtc

SEQ ID NO: 1904026 - DNA, 15 bp, Homo sapiens
ggcaccctttggtct

SEQ ID NO: 1904027 - DNA, 15 bp, Homo sapiens
gcaccctttggtctt

SEQ ID NO: 1904028 - DNA, 15 bp, Homo sapiens
caccctttggtcttg

SEQ ID NO: 1904029 - DNA, 15 bp, Homo sapiens
accctttggtcttgt

SEQ ID NO: 1904030 - DNA, 15 bp, Homo sapiens
ccctttggtcttgta

SEQ ID NO: 1904031 - DNA, 15 bp, Homo sapiens
cctttggtcttgtaa

SEQ ID NO: 1904032 - DNA, 15 bp, Homo sapiens
ctttggtcttgtaaa

SEQ ID NO: 1904033 - DNA, 15 bp, Homo sapiens
tttggtcttgtaaag

SEQ ID NO: 1904034 - DNA, 15 bp, Homo sapiens
ttggtcttgtaaagc

SEQ ID NO: 1904035 - DNA, 15 bp, Homo sapiens
tggtcttgtaaagcc

SEQ ID NO: 1904036 - DNA, 15 bp, Homo sapiens
ggtcttgtaaagcct

SEQ ID NO: 1904037 - DNA, 15 bp, Homo sapiens
gtcttgtaaagcctt

SEQ ID NO: 1904038 - DNA, 15 bp, Homo sapiens
tcttgtaaagccttt

SEQ ID NO: 1904039 - DNA, 15 bp, Homo sapiens
cttgtaaagcctttt

SEQ ID NO: 1904040 - DNA, 15 bp, Homo sapiens
ttgtaaagccttttt

SEQ ID NO: 1904041 - DNA, 15 bp, Homo sapiens
tgtaaagcctttttt

SEQ ID NO: 1904042 - DNA, 15 bp, Homo sapiens
gtaaagcctttttta

SEQ ID NO: 1904043 - DNA, 15 bp, Homo sapiens
taaagccttttttat

SEQ ID NO: 1904044 - DNA, 15 bp, Homo sapiens
aaagccttttttatc

SEQ ID NO: 1904045 - DNA, 15 bp, Homo sapiens
aagccttttttatct

SEQ ID NO: 1904046 - DNA, 15 bp, Homo sapiens
agccttttttatctt

SEQ ID NO: 1904047 - DNA, 15 bp, Homo sapiens
gccttttttatctta

SEQ ID NO: 1904048 - DNA, 15 bp, Homo sapiens
ccttttttatcttag

SEQ ID NO: 1904049 - DNA, 15 bp, Homo sapiens
cttttttatcttaga

SEQ ID NO: 1904050 - DNA, 15 bp, Homo sapiens
ttttttatcttagaa

SEQ ID NO: 1904051 - DNA, 15 bp, Homo sapiens
tttttatcttagaag

SEQ ID NO: 1904052 - DNA, 15 bp, Homo sapiens
ttttatcttagaagg

SEQ ID NO: 1904053 - DNA, 15 bp, Homo sapiens
tttatcttagaaggg

SEQ ID NO: 1904054 - DNA, 15 bp, Homo sapiens
ttatcttagaagggc

SEQ ID NO: 1904055 - DNA, 15 bp, Homo sapiens
tatcttagaagggca

SEQ ID NO: 1904056 - DNA, 15 bp, Homo sapiens
atcttagaagggcat

SEQ ID NO: 1904057 - DNA, 15 bp, Homo sapiens
tcttagaagggcatg

SEQ ID NO: 1904058 - DNA, 15 bp, Homo sapiens
cttagaagggcatgt

SEQ ID NO: 1904059 - DNA, 15 bp, Homo sapiens
ttagaagggcatgtg

SEQ ID NO: 1904060 - DNA, 15 bp, Homo sapiens
tagaagggcatgtgg

SEQ ID NO: 1904061 - DNA, 15 bp, Homo sapiens
agaagggcatgtggg

SEQ ID NO: 1904062 - DNA, 15 bp, Homo sapiens
gaagggcatgtgggc

SEQ ID NO: 1904063 - DNA, 15 bp, Homo sapiens
aagggcatgtgggca

SEQ ID NO: 1904064 - DNA, 15 bp, Homo sapiens
agggcatgtgggcaa

SEQ ID NO: 1904065 - DNA, 15 bp, Homo sapiens
gggcatgtgggcaac

SEQ ID NO: 1904066 - DNA, 15 bp, Homo sapiens
ggcatgtgggcaact

SEQ ID NO: 1904067 - DNA, 15 bp, Homo sapiens
gcatgtgggcaactg

SEQ ID NO: 1904068 - DNA, 15 bp, Homo sapiens
catgtgggcaactgt

SEQ ID NO: 1904069 - DNA, 15 bp, Homo sapiens
atgtgggcaactgtc

SEQ ID NO: 1904070 - DNA, 15 bp, Homo sapiens
tgtgggcaactgtct

SEQ ID NO: 1904071 - DNA, 15 bp, Homo sapiens
gtgggcaactgtctt

SEQ ID NO: 1904072 - DNA, 15 bp, Homo sapiens
tgggcaactgtcttt

SEQ ID NO: 1904073 - DNA, 15 bp, Homo sapiens
gggcaactgtctttg

SEQ ID NO: 1904074 - DNA, 15 bp, Homo sapiens
ggcaactgtctttga

SEQ ID NO: 1904075 - DNA, 15 bp, Homo sapiens
gcaactgtctttgac

SEQ ID NO: 1904076 - DNA, 15 bp, Homo sapiens
caactgtctttgaca

SEQ ID NO: 1904077 - DNA, 15 bp, Homo sapiens
aactgtctttgacac

SEQ ID NO: 1904078 - DNA, 15 bp, Homo sapiens
actgtctttgacaca

SEQ ID NO: 1904079 - DNA, 15 bp, Homo sapiens
ctgtctttgacacat

SEQ ID NO: 1904080 - DNA, 15 bp, Homo sapiens
tgtctttgacacatt

SEQ ID NO: 1904081 - DNA, 15 bp, Homo sapiens
gtctttgacacattg

SEQ ID NO: 1904082 - DNA, 15 bp, Homo sapiens
tctttgacacattga

SEQ ID NO: 1904083 - DNA, 15 bp, Homo sapiens
ctttgacacattgaa

SEQ ID NO: 1904084 - DNA, 15 bp, Homo sapiens
tttgacacattgaaa

SEQ ID NO: 1904085 - DNA, 15 bp, Homo sapiens
ttgacacattgaaac

SEQ ID NO: 1904086 - DNA, 15 bp, Homo sapiens
tgacacattgaaacc

SEQ ID NO: 1904087 - DNA, 15 bp, Homo sapiens
gacacattgaaaccg

SEQ ID NO: 1904088 - DNA, 15 bp, Homo sapiens
acacattgaaaccgc

SEQ ID NO: 1904089 - DNA, 15 bp, Homo sapiens
cacattgaaaccgcc

SEQ ID NO: 1904090 - DNA, 15 bp, Homo sapiens
acattgaaaccgcct

SEQ ID NO: 1904091 - DNA, 15 bp, Homo sapiens
cattgaaaccgcctg

SEQ ID NO: 1904092 - DNA, 15 bp, Homo sapiens
attgaaaccgcctgt

SEQ ID NO: 1904093 - DNA, 15 bp, Homo sapiens
ttgaaaccgcctgta

SEQ ID NO: 1904094 - DNA, 15 bp, Homo sapiens
tgaaaccgcctgtat

SEQ ID NO: 1904095 - DNA, 15 bp, Homo sapiens
gaaaccgcctgtatg

SEQ ID NO: 1904096 - DNA, 15 bp, Homo sapiens
aaaccgcctgtatgg

SEQ ID NO: 1904097 - DNA, 15 bp, Homo sapiens
aaccgcctgtatggt

SEQ ID NO: 1904098 - DNA, 15 bp, Homo sapiens
accgcctgtatggtg

SEQ ID NO: 1904099 - DNA, 15 bp, Homo sapiens
ccgcctgtatggtgg

SEQ ID NO: 1904100 - DNA, 15 bp, Homo sapiens
cgcctgtatggtggt

SEQ ID NO: 1904101 - DNA, 15 bp, Homo sapiens
gcctgtatggtggtg

SEQ ID NO: 1904102 - DNA, 15 bp, Homo sapiens
cctgtatggtggtgg

SEQ ID NO: 1904103 - DNA, 15 bp, Homo sapiens
ctgtatggtggtgga

SEQ ID NO: 1904104 - DNA, 15 bp, Homo sapiens
tgtatggtggtggat

SEQ ID NO: 1904105 - DNA, 15 bp, Homo sapiens
gtatggtggtggatg

SEQ ID NO: 1904106 - DNA, 15 bp, Homo sapiens
tatggtggtggatgt

SEQ ID NO: 1904107 - DNA, 15 bp, Homo sapiens
atggtggtggatgtc

SEQ ID NO: 1904108 - DNA, 15 bp, Homo sapiens
tggtggtggatgtct

SEQ ID NO: 1904109 - DNA, 15 bp, Homo sapiens
ggtggtggatgtctt

SEQ ID NO: 1904110 - DNA, 15 bp, Homo sapiens
gtggtggatgtcttg

SEQ ID NO: 1904111 - DNA, 15 bp, Homo sapiens
tggtggatgtcttga

SEQ ID NO: 1904112 - DNA, 15 bp, Homo sapiens
ggtggatgtcttgaa

SEQ ID NO: 1904113 - DNA, 15 bp, Homo sapiens
gtggatgtcttgaag

SEQ ID NO: 1904114 - DNA, 15 bp, Homo sapiens
tggatgtcttgaagg

SEQ ID NO: 1904115 - DNA, 15 bp, Homo sapiens
ggatgtcttgaaggt

SEQ ID NO: 1904116 - DNA, 15 bp, Homo sapiens
gatgtcttgaaggtt

SEQ ID NO: 1904117 - DNA, 15 bp, Homo sapiens
atgtcttgaaggttg

SEQ ID NO: 1904118 - DNA, 15 bp, Homo sapiens
tgtcttgaaggttga

SEQ ID NO: 1904119 - DNA, 15 bp, Homo sapiens
gtcttgaaggttgat

SEQ ID NO: 1904120 - DNA, 15 bp, Homo sapiens
tcttgaaggttgatt

SEQ ID NO: 1904121 - DNA, 15 bp, Homo sapiens
cttgaaggttgattt

SEQ ID NO: 1904122 - DNA, 15 bp, Homo sapiens
ttgaaggttgatttg

SEQ ID NO: 1904123 - DNA, 15 bp, Homo sapiens
tgaaggttgatttgg

SEQ ID NO: 1904124 - DNA, 15 bp, Homo sapiens
gaaggttgatttgga

SEQ ID NO: 1904125 - DNA, 15 bp, Homo sapiens
aaggttgatttggac

SEQ ID NO: 1904126 - DNA, 15 bp, Homo sapiens
aggttgatttggacc

SEQ ID NO: 1904127 - DNA, 15 bp, Homo sapiens
ggttgatttggacct

SEQ ID NO: 1904128 - DNA, 15 bp, Homo sapiens
gttgatttggacctc

SEQ ID NO: 1904129 - DNA, 15 bp, Homo sapiens
ttgatttggacctca

SEQ ID NO: 1904130 - DNA, 15 bp, Homo sapiens
tgatttggacctcat

SEQ ID NO: 1904131 - DNA, 15 bp, Homo sapiens
gatttggacctcatt

SEQ ID NO: 1904132 - DNA, 15 bp, Homo sapiens
atttggacctcattt

SEQ ID NO: 1904133 - DNA, 15 bp, Homo sapiens
tttggacctcattta

SEQ ID NO: 1904134 - DNA, 15 bp, Homo sapiens
ttggacctcatttac

SEQ ID NO: 1904135 - DNA, 15 bp, Homo sapiens
tggacctcatttact

SEQ ID NO: 1904136 - DNA, 15 bp, Homo sapiens
ggacctcatttactt

SEQ ID NO: 1904137 - DNA, 15 bp, Homo sapiens
gacctcatttacttg

SEQ ID NO: 1904138 - DNA, 15 bp, Homo sapiens
acctcatttacttgg

SEQ ID NO: 1904139 - DNA, 15 bp, Homo sapiens
cctcatttacttggg

SEQ ID NO: 1904140 - DNA, 15 bp, Homo sapiens
ctcatttacttgggc

SEQ ID NO: 1904141 - DNA, 15 bp, Homo sapiens
tcatttacttgggca

SEQ ID NO: 1904142 - DNA, 15 bp, Homo sapiens
catttacttgggcag

SEQ ID NO: 1904143 - DNA, 15 bp, Homo sapiens
atttacttgggcaga

SEQ ID NO: 1904144 - DNA, 15 bp, Homo sapiens
tttacttgggcagat

SEQ ID NO: 1904145 - DNA, 15 bp, Homo sapiens
ttacttgggcagatc

SEQ ID NO: 1904146 - DNA, 15 bp, Homo sapiens
tacttgggcagatcc

SEQ ID NO: 1904147 - DNA, 15 bp, Homo sapiens
acttgggcagatcct

SEQ ID NO: 1904148 - DNA, 15 bp, Homo sapiens
cttgggcagatcctc

SEQ ID NO: 1904149 - DNA, 15 bp, Homo sapiens
ttgggcagatcctct

SEQ ID NO: 1904150 - DNA, 15 bp, Homo sapiens
tgggcagatcctcta

SEQ ID NO: 1904151 - DNA, 15 bp, Homo sapiens
gggcagatcctctat

SEQ ID NO: 1904152 - DNA, 15 bp, Homo sapiens
ggcagatcctctata

SEQ ID NO: 1904153 - DNA, 15 bp, Homo sapiens
gcagatcctctatat

SEQ ID NO: 1904154 - DNA, 15 bp, Homo sapiens
cagatcctctatata

SEQ ID NO: 1904155 - DNA, 15 bp, Homo sapiens
agatcctctatatat

SEQ ID NO: 1904156 - DNA, 15 bp, Homo sapiens
gatcctctatatatt

SEQ ID NO: 1904157 - DNA, 15 bp, Homo sapiens
atcctctatatattc

SEQ ID NO: 1904158 - DNA, 15 bp, Homo sapiens
tcctctatatattct

SEQ ID NO: 1904159 - DNA, 15 bp, Homo sapiens
cctctatatattctg

SEQ ID NO: 1904160 - DNA, 15 bp, Homo sapiens
ctctatatattctga

SEQ ID NO: 1904161 - DNA, 15 bp, Homo sapiens
tctatatattctgat

SEQ ID NO: 1904162 - DNA, 15 bp, Homo sapiens
ctatatattctgata

SEQ ID NO: 1904163 - DNA, 15 bp, Homo sapiens
tatatattctgataa

SEQ ID NO: 1904164 - DNA, 15 bp, Homo sapiens
atatattctgataat

SEQ ID NO: 1904165 - DNA, 15 bp, Homo sapiens
tatattctgataatc

SEQ ID NO: 1904166 - DNA, 15 bp, Homo sapiens
atattctgataatcc

SEQ ID NO: 1904167 - DNA, 15 bp, Homo sapiens
tattctgataatcca

SEQ ID NO: 1904168 - DNA, 15 bp, Homo sapiens
attctgataatccag

SEQ ID NO: 1904169 - DNA, 15 bp, Homo sapiens
ttctgataatccagt

SEQ ID NO: 1904170 - DNA, 15 bp, Homo sapiens
tctgataatccagtg

SEQ ID NO: 1904171 - DNA, 15 bp, Homo sapiens
ctgataatccagtga

SEQ ID NO: 1904172 - DNA, 15 bp, Homo sapiens
tgataatccagtgat

SEQ ID NO: 1904173 - DNA, 15 bp, Homo sapiens
gataatccagtgatg

SEQ ID NO: 1904174 - DNA, 15 bp, Homo sapiens
ataatccagtgatgt

SEQ ID NO: 1904175 - DNA, 15 bp, Homo sapiens
taatccagtgatgtg

SEQ ID NO: 1904176 - DNA, 15 bp, Homo sapiens
aatccagtgatgtgg

SEQ ID NO: 1904177 - DNA, 15 bp, Homo sapiens
atccagtgatgtggt

SEQ ID NO: 1904178 - DNA, 15 bp, Homo sapiens
tccagtgatgtggta

SEQ ID NO: 1904179 - DNA, 15 bp, Homo sapiens
ccagtgatgtggtag

SEQ ID NO: 1904180 - DNA, 15 bp, Homo sapiens
cagtgatgtggtaga

SEQ ID NO: 1904181 - DNA, 15 bp, Homo sapiens
agtgatgtggtagac

SEQ ID NO: 1904182 - DNA, 15 bp, Homo sapiens
gtgatgtggtagaca

SEQ ID NO: 1904183 - DNA, 15 bp, Homo sapiens
tgatgtggtagacat

SEQ ID NO: 1904184 - DNA, 15 bp, Homo sapiens
gatgtggtagacata

SEQ ID NO: 1904185 - DNA, 15 bp, Homo sapiens
atgtggtagacatat

SEQ ID NO: 1904186 - DNA, 15 bp, Homo sapiens
tgtggtagacatatt

SEQ ID NO: 1904187 - DNA, 15 bp, Homo sapiens
gtggtagacatattt

SEQ ID NO: 1904188 - DNA, 15 bp, Homo sapiens
tggtagacatatttt

SEQ ID NO: 1904189 - DNA, 15 bp, Homo sapiens
ggtagacatattttt

SEQ ID NO: 1904190 - DNA, 15 bp, Homo sapiens
gtagacatatttttt

SEQ ID NO: 1904191 - DNA, 15 bp, Homo sapiens
tagacatattttttc

SEQ ID NO: 1904192 - DNA, 15 bp, Homo sapiens
agacatattttttct

SEQ ID NO: 1904193 - DNA, 15 bp, Homo sapiens
gacatattttttctc

SEQ ID NO: 1904194 - DNA, 15 bp, Homo sapiens
acatattttttctct

SEQ ID NO: 1904195 - DNA, 15 bp, Homo sapiens
catattttttctctg

SEQ ID NO: 1904196 - DNA, 15 bp, Homo sapiens
atattttttctctga

SEQ ID NO: 1904197 - DNA, 15 bp, Homo sapiens
tattttttctctgaa

SEQ ID NO: 1904198 - DNA, 15 bp, Homo sapiens
attttttctctgaat

SEQ ID NO: 1904199 - DNA, 15 bp, Homo sapiens
ttttttctctgaatg

SEQ ID NO: 1904200 - DNA, 15 bp, Homo sapiens
tttttctctgaatgt

SEQ ID NO: 1904201 - DNA, 15 bp, Homo sapiens
ttttctctgaatgtg

SEQ ID NO: 1904202 - DNA, 15 bp, Homo sapiens
tttctctgaatgtga

SEQ ID NO: 1904203 - DNA, 15 bp, Homo sapiens
ttctctgaatgtgaa

SEQ ID NO: 1904204 - DNA, 15 bp, Homo sapiens
tctctgaatgtgaat

SEQ ID NO: 1904205 - DNA, 15 bp, Homo sapiens
ctctgaatgtgaatt

SEQ ID NO: 1904206 - DNA, 15 bp, Homo sapiens
tctgaatgtgaattc

SEQ ID NO: 1904207 - DNA, 15 bp, Homo sapiens
ctgaatgtgaattct

SEQ ID NO: 1904208 - DNA, 15 bp, Homo sapiens
tgaatgtgaattctg

SEQ ID NO: 1904209 - DNA, 15 bp, Homo sapiens
gaatgtgaattctgt

SEQ ID NO: 1904210 - DNA, 15 bp, Homo sapiens
aatgtgaattctgtc

SEQ ID NO: 1904211 - DNA, 15 bp, Homo sapiens
atgtgaattctgtca

SEQ ID NO: 1904212 - DNA, 15 bp, Homo sapiens
tgtgaattctgtcat

SEQ ID NO: 1904213 - DNA, 15 bp, Homo sapiens
gtgaattctgtcata

SEQ ID NO: 1904214 - DNA, 15 bp, Homo sapiens
tgaattctgtcatag

SEQ ID NO: 1904215 - DNA, 15 bp, Homo sapiens
gaattctgtcatagc

SEQ ID NO: 1904216 - DNA, 15 bp, Homo sapiens
aattctgtcatagct

SEQ ID NO: 1904217 - DNA, 15 bp, Homo sapiens
attctgtcatagcta

SEQ ID NO: 1904218 - DNA, 15 bp, Homo sapiens
ttctgtcatagctag

SEQ ID NO: 1904219 - DNA, 15 bp, Homo sapiens
tctgtcatagctaga

SEQ ID NO: 1904220 - DNA, 15 bp, Homo sapiens
ctgtcatagctagaa

SEQ ID NO: 1904221 - DNA, 15 bp, Homo sapiens
tgtcatagctagaac

SEQ ID NO: 1904222 - DNA, 15 bp, Homo sapiens
gtcatagctagaact

SEQ ID NO: 1904223 - DNA, 15 bp, Homo sapiens
tcatagctagaactt

SEQ ID NO: 1904224 - DNA, 15 bp, Homo sapiens
catagctagaacttt

SEQ ID NO: 1904225 - DNA, 15 bp, Homo sapiens
atagctagaactttg

SEQ ID NO: 1904226 - DNA, 15 bp, Homo sapiens
tagctagaactttgg

SEQ ID NO: 1904227 - DNA, 15 bp, Homo sapiens
agctagaactttggg

SEQ ID NO: 1904228 - DNA, 15 bp, Homo sapiens
gctagaactttgggt

SEQ ID NO: 1904229 - DNA, 15 bp, Homo sapiens
ctagaactttgggtt

SEQ ID NO: 1904230 - DNA, 15 bp, Homo sapiens
tagaactttgggttg

SEQ ID NO: 1904231 - DNA, 15 bp, Homo sapiens
agaactttgggttga

SEQ ID NO: 1904232 - DNA, 15 bp, Homo sapiens
gaactttgggttgat

SEQ ID NO: 1904233 - DNA, 15 bp, Homo sapiens
aactttgggttgata

SEQ ID NO: 1904234 - DNA, 15 bp, Homo sapiens
actttgggttgatac

SEQ ID NO: 1904235 - DNA, 15 bp, Homo sapiens
ctttgggttgatact

SEQ ID NO: 1904236 - DNA, 15 bp, Homo sapiens
tttgggttgatactt

SEQ ID NO: 1904237 - DNA, 15 bp, Homo sapiens
ttgggttgatacttg

SEQ ID NO: 1904238 - DNA, 15 bp, Homo sapiens
tgggttgatacttgt

SEQ ID NO: 1904239 - DNA, 15 bp, Homo sapiens
gggttgatacttgta

SEQ ID NO: 1904240 - DNA, 15 bp, Homo sapiens
ggttgatacttgtaa

SEQ ID NO: 1904241 - DNA, 15 bp, Homo sapiens
gttgatacttgtaat

SEQ ID NO: 1904242 - DNA, 15 bp, Homo sapiens
ttgatacttgtaatt

SEQ ID NO: 1904243 - DNA, 15 bp, Homo sapiens
tgatacttgtaattc

SEQ ID NO: 1904244 - DNA, 15 bp, Homo sapiens
gatacttgtaattcc

SEQ ID NO: 1904245 - DNA, 15 bp, Homo sapiens
atacttgtaattccc

SEQ ID NO: 1904246 - DNA, 15 bp, Homo sapiens
tacttgtaattcccc

SEQ ID NO: 1904247 - DNA, 15 bp, Homo sapiens
acttgtaattcccct

SEQ ID NO: 1904248 - DNA, 15 bp, Homo sapiens
cttgtaattcccctt

SEQ ID NO: 1904249 - DNA, 15 bp, Homo sapiens
ttgtaattccccttt

SEQ ID NO: 1904250 - DNA, 15 bp, Homo sapiens
tgtaattccccttta

SEQ ID NO: 1904251 - DNA, 15 bp, Homo sapiens
gtaattcccctttag

SEQ ID NO: 1904252 - DNA, 15 bp, Homo sapiens
taattcccctttagt

SEQ ID NO: 1904253 - DNA, 15 bp, Homo sapiens
aattcccctttagtt

SEQ ID NO: 1904254 - DNA, 15 bp, Homo sapiens
attcccctttagtta

SEQ ID NO: 1904255 - DNA, 15 bp, Homo sapiens
ttcccctttagttaa

SEQ ID NO: 1904256 - DNA, 15 bp, Homo sapiens
tcccctttagttaaa

SEQ ID NO: 1904257 - DNA, 15 bp, Homo sapiens
cccctttagttaaag

SEQ ID NO: 1904258 - DNA, 15 bp, Homo sapiens
ccctttagttaaagg

SEQ ID NO: 1904259 - DNA, 15 bp, Homo sapiens
cctttagttaaagga

SEQ ID NO: 1904260 - DNA, 15 bp, Homo sapiens
ctttagttaaaggaa

SEQ ID NO: 1904261 - DNA, 15 bp, Homo sapiens
tttagttaaaggaag

SEQ ID NO: 1904262 - DNA, 15 bp, Homo sapiens
ttagttaaaggaagg

SEQ ID NO: 1904263 - DNA, 15 bp, Homo sapiens
tagttaaaggaagga

SEQ ID NO: 1904264 - DNA, 15 bp, Homo sapiens
agttaaaggaaggag

SEQ ID NO: 1904265 - DNA, 15 bp, Homo sapiens
gttaaaggaaggagc

SEQ ID NO: 1904266 - DNA, 15 bp, Homo sapiens
ttaaaggaaggagcc

SEQ ID NO: 1904267 - DNA, 15 bp, Homo sapiens
taaaggaaggagcca

SEQ ID NO: 1904268 - DNA, 15 bp, Homo sapiens
aaaggaaggagccac

SEQ ID NO: 1904269 - DNA, 15 bp, Homo sapiens
aaggaaggagccaca

SEQ ID NO: 1904270 - DNA, 15 bp, Homo sapiens
aggaaggagccacag

SEQ ID NO: 1904271 - DNA, 15 bp, Homo sapiens
ggaaggagccacagg

SEQ ID NO: 1904272 - DNA, 15 bp, Homo sapiens
gaaggagccacaggg

SEQ ID NO: 1904273 - DNA, 15 bp, Homo sapiens
aaggagccacagggg

SEQ ID NO: 1904274 - DNA, 15 bp, Homo sapiens
aggagccacaggggt

SEQ ID NO: 1904275 - DNA, 15 bp, Homo sapiens
ggagccacaggggtg

SEQ ID NO: 1904276 - DNA, 15 bp, Homo sapiens
gagccacaggggtgt

SEQ ID NO: 1904277 - DNA, 15 bp, Homo sapiens
agccacaggggtgta

SEQ ID NO: 1904278 - DNA, 15 bp, Homo sapiens
gccacaggggtgtat

SEQ ID NO: 1904279 - DNA, 15 bp, Homo sapiens
ccacaggggtgtatt

SEQ ID NO: 1904280 - DNA, 15 bp, Homo sapiens
cacaggggtgtatta

SEQ ID NO: 1904281 - DNA, 15 bp, Homo sapiens
acaggggtgtattag

SEQ ID NO: 1904282 - DNA, 15 bp, Homo sapiens
caggggtgtattagt

SEQ ID NO: 1904283 - DNA, 15 bp, Homo sapiens
aggggtgtattagtc

SEQ ID NO: 1904284 - DNA, 15 bp, Homo sapiens
ggggtgtattagtct

SEQ ID NO: 1904285 - DNA, 15 bp, Homo sapiens
gggtgtattagtctg

SEQ ID NO: 1904286 - DNA, 15 bp, Homo sapiens
ggtgtattagtctgt

SEQ ID NO: 1904287 - DNA, 15 bp, Homo sapiens
gtgtattagtctgtt

SEQ ID NO: 1904288 - DNA, 15 bp, Homo sapiens
tgtattagtctgttc

SEQ ID NO: 1904289 - DNA, 15 bp, Homo sapiens
gtattagtctgttct

SEQ ID NO: 1904290 - DNA, 15 bp, Homo sapiens
tattagtctgttctc

SEQ ID NO: 1904291 - DNA, 15 bp, Homo sapiens
attagtctgttctca

SEQ ID NO: 1904292 - DNA, 15 bp, Homo sapiens
ttagtctgttctcaa

SEQ ID NO: 1904293 - DNA, 15 bp, Homo sapiens
tagtctgttctcaat

SEQ ID NO: 1904294 - DNA, 15 bp, Homo sapiens
agtctgttctcaatt

SEQ ID NO: 1904295 - DNA, 15 bp, Homo sapiens
gtctgttctcaattt

SEQ ID NO: 1904296 - DNA, 15 bp, Homo sapiens
tctgttctcaatttg

SEQ ID NO: 1904297 - DNA, 15 bp, Homo sapiens
ctgttctcaatttgc

SEQ ID NO: 1904298 - DNA, 15 bp, Homo sapiens
tgttctcaatttgct

SEQ ID NO: 1904299 - DNA, 15 bp, Homo sapiens
gttctcaatttgcta

SEQ ID NO: 1904300 - DNA, 15 bp, Homo sapiens
ttctcaatttgctat

SEQ ID NO: 1904301 - DNA, 15 bp, Homo sapiens
tctcaatttgctata

SEQ ID NO: 1904302 - DNA, 15 bp, Homo sapiens
ctcaatttgctataa

SEQ ID NO: 1904303 - DNA, 15 bp, Homo sapiens
tcaatttgctataaa

SEQ ID NO: 1904304 - DNA, 15 bp, Homo sapiens
caatttgctataaag

SEQ ID NO: 1904305 - DNA, 15 bp, Homo sapiens
aatttgctataaaga

SEQ ID NO: 1904306 - DNA, 15 bp, Homo sapiens
atttgctataaagaa

SEQ ID NO: 1904307 - DNA, 15 bp, Homo sapiens
tttgctataaagaaa

SEQ ID NO: 1904308 - DNA, 15 bp, Homo sapiens
ttgctataaagaaat

SEQ ID NO: 1904309 - DNA, 15 bp, Homo sapiens
tgctataaagaaata

SEQ ID NO: 1904310 - DNA, 15 bp, Homo sapiens
gctataaagaaatac

SEQ ID NO: 1904311 - DNA, 15 bp, Homo sapiens
ctataaagaaatacc

SEQ ID NO: 1904312 - DNA, 15 bp, Homo sapiens
tataaagaaatacct

SEQ ID NO: 1904313 - DNA, 15 bp, Homo sapiens
ataaagaaatacctg

SEQ ID NO: 1904314 - DNA, 15 bp, Homo sapiens
taaagaaatacctga

SEQ ID NO: 1904315 - DNA, 15 bp, Homo sapiens
aaagaaatacctgag

SEQ ID NO: 1904316 - DNA, 15 bp, Homo sapiens
aagaaatacctgaga

SEQ ID NO: 1904317 - DNA, 15 bp, Homo sapiens
agaaatacctgagac

SEQ ID NO: 1904318 - DNA, 15 bp, Homo sapiens
gaaatacctgagact

SEQ ID NO: 1904319 - DNA, 15 bp, Homo sapiens
aaatacctgagactg

SEQ ID NO: 1904320 - DNA, 15 bp, Homo sapiens
aatacctgagactgg

SEQ ID NO: 1904321 - DNA, 15 bp, Homo sapiens
atacctgagactggg

SEQ ID NO: 1904322 - DNA, 15 bp, Homo sapiens
tacctgagactgggt

SEQ ID NO: 1904323 - DNA, 15 bp, Homo sapiens
acctgagactgggta

SEQ ID NO: 1904324 - DNA, 15 bp, Homo sapiens
cctgagactgggtaa

SEQ ID NO: 1904325 - DNA, 15 bp, Homo sapiens
ctgagactgggtaat

SEQ ID NO: 1904326 - DNA, 15 bp, Homo sapiens
tgagactgggtaatt

SEQ ID NO: 1904327 - DNA, 15 bp, Homo sapiens
gagactgggtaattt

SEQ ID NO: 1904328 - DNA, 15 bp, Homo sapiens
agactgggtaattta

SEQ ID NO: 1904329 - DNA, 15 bp, Homo sapiens
gactgggtaatttat

SEQ ID NO: 1904330 - DNA, 15 bp, Homo sapiens
actgggtaatttata

SEQ ID NO: 1904331 - DNA, 15 bp, Homo sapiens
ctgggtaatttataa

SEQ ID NO: 1904332 - DNA, 15 bp, Homo sapiens
tgggtaatttataag

SEQ ID NO: 1904333 - DNA, 15 bp, Homo sapiens
gggtaatttataaga

SEQ ID NO: 1904334 - DNA, 15 bp, Homo sapiens
ggtaatttataagaa

SEQ ID NO: 1904335 - DNA, 15 bp, Homo sapiens
gtaatttataagaaa

SEQ ID NO: 1904336 - DNA, 15 bp, Homo sapiens
taatttataagaaaa

SEQ ID NO: 1904337 - DNA, 15 bp, Homo sapiens
aatttataagaaaag

SEQ ID NO: 1904338 - DNA, 15 bp, Homo sapiens
atttataagaaaaga

SEQ ID NO: 1904339 - DNA, 15 bp, Homo sapiens
tttataagaaaagag

SEQ ID NO: 1904340 - DNA, 15 bp, Homo sapiens
ttataagaaaagagg

SEQ ID NO: 1904341 - DNA, 15 bp, Homo sapiens
tataagaaaagaggt

SEQ ID NO: 1904342 - DNA, 15 bp, Homo sapiens
ataagaaaagaggtt

SEQ ID NO: 1904343 - DNA, 15 bp, Homo sapiens
taagaaaagaggttt

SEQ ID NO: 1904344 - DNA, 15 bp, Homo sapiens
aagaaaagaggttta

SEQ ID NO: 1904345 - DNA, 15 bp, Homo sapiens
agaaaagaggtttaa

SEQ ID NO: 1904346 - DNA, 15 bp, Homo sapiens
gaaaagaggtttaat

SEQ ID NO: 1904347 - DNA, 15 bp, Homo sapiens
aaaagaggtttaatc

SEQ ID NO: 1904348 - DNA, 15 bp, Homo sapiens
aaagaggtttaatcg

SEQ ID NO: 1904349 - DNA, 15 bp, Homo sapiens
aagaggtttaatcgg

SEQ ID NO: 1904350 - DNA, 15 bp, Homo sapiens
agaggtttaatcggc

SEQ ID NO: 1904351 - DNA, 15 bp, Homo sapiens
gaggtttaatcggct

SEQ ID NO: 1904352 - DNA, 15 bp, Homo sapiens
aggtttaatcggctc

SEQ ID NO: 1904353 - DNA, 15 bp, Homo sapiens
ggtttaatcggctca

SEQ ID NO: 1904354 - DNA, 15 bp, Homo sapiens
gtttaatcggctcat

SEQ ID NO: 1904355 - DNA, 15 bp, Homo sapiens
tttaatcggctcata

SEQ ID NO: 1904356 - DNA, 15 bp, Homo sapiens
ttaatcggctcatag

SEQ ID NO: 1904357 - DNA, 15 bp, Homo sapiens
taatcggctcatagt

SEQ ID NO: 1904358 - DNA, 15 bp, Homo sapiens
aatcggctcatagtt

SEQ ID NO: 1904359 - DNA, 15 bp, Homo sapiens
atcggctcatagttc

SEQ ID NO: 1904360 - DNA, 15 bp, Homo sapiens
tcggctcatagttct

SEQ ID NO: 1904361 - DNA, 15 bp, Homo sapiens
cggctcatagttctg

SEQ ID NO: 1904362 - DNA, 15 bp, Homo sapiens
ggctcatagttctgc

SEQ ID NO: 1904363 - DNA, 15 bp, Homo sapiens
gctcatagttctgca

SEQ ID NO: 1904364 - DNA, 15 bp, Homo sapiens
ctcatagttctgcag

SEQ ID NO: 1904365 - DNA, 15 bp, Homo sapiens
tcatagttctgcagg

SEQ ID NO: 1904366 - DNA, 15 bp, Homo sapiens
catagttctgcaggc

SEQ ID NO: 1904367 - DNA, 15 bp, Homo sapiens
atagttctgcaggct

SEQ ID NO: 1904368 - DNA, 15 bp, Homo sapiens
tagttctgcaggcta

SEQ ID NO: 1904369 - DNA, 15 bp, Homo sapiens
agttctgcaggctat

SEQ ID NO: 1904370 - DNA, 15 bp, Homo sapiens
gttctgcaggctata

SEQ ID NO: 1904371 - DNA, 15 bp, Homo sapiens
ttctgcaggctatat

SEQ ID NO: 1904372 - DNA, 15 bp, Homo sapiens
tctgcaggctatata

SEQ ID NO: 1904373 - DNA, 15 bp, Homo sapiens
ctgcaggctatatag

SEQ ID NO: 1904374 - DNA, 15 bp, Homo sapiens
tgcaggctatatagg

SEQ ID NO: 1904375 - DNA, 15 bp, Homo sapiens
gcaggctatatagga

SEQ ID NO: 1904376 - DNA, 15 bp, Homo sapiens
caggctatataggaa

SEQ ID NO: 1904377 - DNA, 15 bp, Homo sapiens
aggctatataggaag

SEQ ID NO: 1904378 - DNA, 15 bp, Homo sapiens
ggctatataggaagc

SEQ ID NO: 1904379 - DNA, 15 bp, Homo sapiens
gctatataggaagca

SEQ ID NO: 1904380 - DNA, 15 bp, Homo sapiens
ctatataggaagcat

SEQ ID NO: 1904381 - DNA, 15 bp, Homo sapiens
tatataggaagcata

SEQ ID NO: 1904382 - DNA, 15 bp, Homo sapiens
atataggaagcatag

SEQ ID NO: 1904383 - DNA, 15 bp, Homo sapiens
tataggaagcatagc

SEQ ID NO: 1904384 - DNA, 15 bp, Homo sapiens
ataggaagcatagca

SEQ ID NO: 1904385 - DNA, 15 bp, Homo sapiens
taggaagcatagcag

SEQ ID NO: 1904386 - DNA, 15 bp, Homo sapiens
aggaagcatagcagc

SEQ ID NO: 1904387 - DNA, 15 bp, Homo sapiens
ggaagcatagcagca

SEQ ID NO: 1904388 - DNA, 15 bp, Homo sapiens
gaagcatagcagcat

SEQ ID NO: 1904389 - DNA, 15 bp, Homo sapiens
aagcatagcagcatc

SEQ ID NO: 1904390 - DNA, 15 bp, Homo sapiens
agcatagcagcatct

SEQ ID NO: 1904391 - DNA, 15 bp, Homo sapiens
gcatagcagcatctg

SEQ ID NO: 1904392 - DNA, 15 bp, Homo sapiens
catagcagcatctgc

SEQ ID NO: 1904393 - DNA, 15 bp, Homo sapiens
atagcagcatctgct

SEQ ID NO: 1904394 - DNA, 15 bp, Homo sapiens
tagcagcatctgctg

SEQ ID NO: 1904395 - DNA, 15 bp, Homo sapiens
agcagcatctgctgc

SEQ ID NO: 1904396 - DNA, 15 bp, Homo sapiens
gcagcatctgctgct

SEQ ID NO: 1904397 - DNA, 15 bp, Homo sapiens
cagcatctgctgctg

SEQ ID NO: 1904398 - DNA, 15 bp, Homo sapiens
agcatctgctgctgg

SEQ ID NO: 1904399 - DNA, 15 bp, Homo sapiens
gcatctgctgctggg

SEQ ID NO: 1904400 - DNA, 15 bp, Homo sapiens
catctgctgctgggg

SEQ ID NO: 1904401 - DNA, 15 bp, Homo sapiens
atctgctgctgggga

SEQ ID NO: 1904402 - DNA, 15 bp, Homo sapiens
tctgctgctggggag

SEQ ID NO: 1904403 - DNA, 15 bp, Homo sapiens
ctgctgctggggagg

SEQ ID NO: 1904404 - DNA, 15 bp, Homo sapiens
tgctgctggggaggc

SEQ ID NO: 1904405 - DNA, 15 bp, Homo sapiens
gctgctggggaggcc

SEQ ID NO: 1904406 - DNA, 15 bp, Homo sapiens
ctgctggggaggcct

SEQ ID NO: 1904407 - DNA, 15 bp, Homo sapiens
tgctggggaggcctc

SEQ ID NO: 1904408 - DNA, 15 bp, Homo sapiens
gctggggaggcctca

SEQ ID NO: 1904409 - DNA, 15 bp, Homo sapiens
ctggggaggcctcag

SEQ ID NO: 1904410 - DNA, 15 bp, Homo sapiens
tggggaggcctcagc

SEQ ID NO: 1904411 - DNA, 15 bp, Homo sapiens
ggggaggcctcagca

SEQ ID NO: 1904412 - DNA, 15 bp, Homo sapiens
gggaggcctcagcaa

SEQ ID NO: 1904413 - DNA, 15 bp, Homo sapiens
ggaggcctcagcaag

SEQ ID NO: 1904414 - DNA, 15 bp, Homo sapiens
gaggcctcagcaagc

SEQ ID NO: 1904415 - DNA, 15 bp, Homo sapiens
aggcctcagcaagct

SEQ ID NO: 1904416 - DNA, 15 bp, Homo sapiens
ggcctcagcaagctt

SEQ ID NO: 1904417 - DNA, 15 bp, Homo sapiens
gcctcagcaagcttc

SEQ ID NO: 1904418 - DNA, 15 bp, Homo sapiens
cctcagcaagcttcc

SEQ ID NO: 1904419 - DNA, 15 bp, Homo sapiens
ctcagcaagcttcca

SEQ ID NO: 1904420 - DNA, 15 bp, Homo sapiens
tcagcaagcttccaa

SEQ ID NO: 1904421 - DNA, 15 bp, Homo sapiens
cagcaagcttccaat

SEQ ID NO: 1904422 - DNA, 15 bp, Homo sapiens
agcaagcttccaatc

SEQ ID NO: 1904423 - DNA, 15 bp, Homo sapiens
gcaagcttccaatca

SEQ ID NO: 1904424 - DNA, 15 bp, Homo sapiens
caagcttccaatcat

SEQ ID NO: 1904425 - DNA, 15 bp, Homo sapiens
aagcttccaatcatg

SEQ ID NO: 1904426 - DNA, 15 bp, Homo sapiens
agcttccaatcatgg

SEQ ID NO: 1904427 - DNA, 15 bp, Homo sapiens
gcttccaatcatggc

SEQ ID NO: 1904428 - DNA, 15 bp, Homo sapiens
cttccaatcatggcg

SEQ ID NO: 1904429 - DNA, 15 bp, Homo sapiens
ttccaatcatggcgg

SEQ ID NO: 1904430 - DNA, 15 bp, Homo sapiens
tccaatcatggcgga

SEQ ID NO: 1904431 - DNA, 15 bp, Homo sapiens
ccaatcatggcggaa

SEQ ID NO: 1904432 - DNA, 15 bp, Homo sapiens
caatcatggcggaag

SEQ ID NO: 1904433 - DNA, 15 bp, Homo sapiens
aatcatggcggaagg

SEQ ID NO: 1904434 - DNA, 15 bp, Homo sapiens
atcatggcggaaggc

SEQ ID NO: 1904435 - DNA, 15 bp, Homo sapiens
tcatggcggaaggca

SEQ ID NO: 1904436 - DNA, 15 bp, Homo sapiens
catggcggaaggcag

SEQ ID NO: 1904437 - DNA, 15 bp, Homo sapiens
atggcggaaggcaga

SEQ ID NO: 1904438 - DNA, 15 bp, Homo sapiens
tggcggaaggcagag

SEQ ID NO: 1904439 - DNA, 15 bp, Homo sapiens
ggcggaaggcagaga

SEQ ID NO: 1904440 - DNA, 15 bp, Homo sapiens
gcggaaggcagagag

SEQ ID NO: 1904441 - DNA, 15 bp, Homo sapiens
cggaaggcagagagg

SEQ ID NO: 1904442 - DNA, 15 bp, Homo sapiens
ggaaggcagagaggg

SEQ ID NO: 1904443 - DNA, 15 bp, Homo sapiens
gaaggcagagaggga

SEQ ID NO: 1904444 - DNA, 15 bp, Homo sapiens
aaggcagagagggag

SEQ ID NO: 1904445 - DNA, 15 bp, Homo sapiens
aggcagagagggagc

SEQ ID NO: 1904446 - DNA, 15 bp, Homo sapiens
ggcagagagggagca

SEQ ID NO: 1904447 - DNA, 15 bp, Homo sapiens
gcagagagggagcag

SEQ ID NO: 1904448 - DNA, 15 bp, Homo sapiens
cagagagggagcagg

SEQ ID NO: 1904449 - DNA, 15 bp, Homo sapiens
agagagggagcaggc

SEQ ID NO: 1904450 - DNA, 15 bp, Homo sapiens
gagagggagcaggca

SEQ ID NO: 1904451 - DNA, 15 bp, Homo sapiens
agagggagcaggcag

SEQ ID NO: 1904452 - DNA, 15 bp, Homo sapiens
gagggagcaggcagg

SEQ ID NO: 1904453 - DNA, 15 bp, Homo sapiens
agggagcaggcaggt

SEQ ID NO: 1904454 - DNA, 15 bp, Homo sapiens
gggagcaggcaggtc

SEQ ID NO: 1904455 - DNA, 15 bp, Homo sapiens
ggagcaggcaggtca

SEQ ID NO: 1904456 - DNA, 15 bp, Homo sapiens
gagcaggcaggtcac

SEQ ID NO: 1904457 - DNA, 15 bp, Homo sapiens
agcaggcaggtcaca

SEQ ID NO: 1904458 - DNA, 15 bp, Homo sapiens
gcaggcaggtcacat

SEQ ID NO: 1904459 - DNA, 15 bp, Homo sapiens
caggcaggtcacatg

SEQ ID NO: 1904460 - DNA, 15 bp, Homo sapiens
aggcaggtcacatgg

SEQ ID NO: 1904461 - DNA, 15 bp, Homo sapiens
ggcaggtcacatggc

SEQ ID NO: 1904462 - DNA, 15 bp, Homo sapiens
gcaggtcacatggcc

SEQ ID NO: 1904463 - DNA, 15 bp, Homo sapiens
caggtcacatggcca

SEQ ID NO: 1904464 - DNA, 15 bp, Homo sapiens
aggtcacatggccac

SEQ ID NO: 1904465 - DNA, 15 bp, Homo sapiens
ggtcacatggccaca

SEQ ID NO: 1904466 - DNA, 15 bp, Homo sapiens
gtcacatggccacag

SEQ ID NO: 1904467 - DNA, 15 bp, Homo sapiens
tcacatggccacagc

SEQ ID NO: 1904468 - DNA, 15 bp, Homo sapiens
cacatggccacagca

SEQ ID NO: 1904469 - DNA, 15 bp, Homo sapiens
acatggccacagcaa

SEQ ID NO: 1904470 - DNA, 15 bp, Homo sapiens
catggccacagcaag

SEQ ID NO: 1904471 - DNA, 15 bp, Homo sapiens
atggccacagcaaga

SEQ ID NO: 1904472 - DNA, 15 bp, Homo sapiens
tggccacagcaagag

SEQ ID NO: 1904473 - DNA, 15 bp, Homo sapiens
ggccacagcaagagc

SEQ ID NO: 1904474 - DNA, 15 bp, Homo sapiens
gccacagcaagagca

SEQ ID NO: 1904475 - DNA, 15 bp, Homo sapiens
ccacagcaagagcaa

SEQ ID NO: 1904476 - DNA, 15 bp, Homo sapiens
cacagcaagagcaag

SEQ ID NO: 1904477 - DNA, 15 bp, Homo sapiens
acagcaagagcaaga

SEQ ID NO: 1904478 - DNA, 15 bp, Homo sapiens
cagcaagagcaagag

SEQ ID NO: 1904479 - DNA, 15 bp, Homo sapiens
agcaagagcaagaga

SEQ ID NO: 1904480 - DNA, 15 bp, Homo sapiens
gcaagagcaagagag

SEQ ID NO: 1904481 - DNA, 15 bp, Homo sapiens
caagagcaagagagc

SEQ ID NO: 1904482 - DNA, 15 bp, Homo sapiens
aagagcaagagagca

SEQ ID NO: 1904483 - DNA, 15 bp, Homo sapiens
agagcaagagagcaa

SEQ ID NO: 1904484 - DNA, 15 bp, Homo sapiens
gagcaagagagcaag

SEQ ID NO: 1904485 - DNA, 15 bp, Homo sapiens
agcaagagagcaagg

SEQ ID NO: 1904486 - DNA, 15 bp, Homo sapiens
gcaagagagcaaggg

SEQ ID NO: 1904487 - DNA, 15 bp, Homo sapiens
caagagagcaagggg

SEQ ID NO: 1904488 - DNA, 15 bp, Homo sapiens
aagagagcaaggggg

SEQ ID NO: 1904489 - DNA, 15 bp, Homo sapiens
agagagcaaggggga

SEQ ID NO: 1904490 - DNA, 15 bp, Homo sapiens
gagagcaagggggag

SEQ ID NO: 1904491 - DNA, 15 bp, Homo sapiens
agagcaagggggagg

SEQ ID NO: 1904492 - DNA, 15 bp, Homo sapiens
gagcaagggggaggt

SEQ ID NO: 1904493 - DNA, 15 bp, Homo sapiens
agcaagggggaggtg

SEQ ID NO: 1904494 - DNA, 15 bp, Homo sapiens
gcaagggggaggtgc

SEQ ID NO: 1904495 - DNA, 15 bp, Homo sapiens
caagggggaggtgcc

SEQ ID NO: 1904496 - DNA, 15 bp, Homo sapiens
aagggggaggtgcca

SEQ ID NO: 1904497 - DNA, 15 bp, Homo sapiens
agggggaggtgccac

SEQ ID NO: 1904498 - DNA, 15 bp, Homo sapiens
gggggaggtgccaca

SEQ ID NO: 1904499 - DNA, 15 bp, Homo sapiens
ggggaggtgccacac

SEQ ID NO: 1904500 - DNA, 15 bp, Homo sapiens
gggaggtgccacaca

SEQ ID NO: 1904501 - DNA, 15 bp, Homo sapiens
ggaggtgccacacac

SEQ ID NO: 1904502 - DNA, 15 bp, Homo sapiens
gaggtgccacacact

SEQ ID NO: 1904503 - DNA, 15 bp, Homo sapiens
aggtgccacacactt

SEQ ID NO: 1904504 - DNA, 15 bp, Homo sapiens
ggtgccacacacttt

SEQ ID NO: 1904505 - DNA, 15 bp, Homo sapiens
gtgccacacactttt

SEQ ID NO: 1904506 - DNA, 15 bp, Homo sapiens
tgccacacactttta

SEQ ID NO: 1904507 - DNA, 15 bp, Homo sapiens
gccacacacttttaa

SEQ ID NO: 1904508 - DNA, 15 bp, Homo sapiens
ccacacacttttaaa

SEQ ID NO: 1904509 - DNA, 15 bp, Homo sapiens
cacacacttttaaac

SEQ ID NO: 1904510 - DNA, 15 bp, Homo sapiens
acacacttttaaact

SEQ ID NO: 1904511 - DNA, 15 bp, Homo sapiens
cacacttttaaacta

SEQ ID NO: 1904512 - DNA, 15 bp, Homo sapiens
acacttttaaactat

SEQ ID NO: 1904513 - DNA, 15 bp, Homo sapiens
cacttttaaactatc

SEQ ID NO: 1904514 - DNA, 15 bp, Homo sapiens
acttttaaactatca

SEQ ID NO: 1904515 - DNA, 15 bp, Homo sapiens
cttttaaactatcag

SEQ ID NO: 1904516 - DNA, 15 bp, Homo sapiens
ttttaaactatcaga

SEQ ID NO: 1904517 - DNA, 15 bp, Homo sapiens
tttaaactatcagat

SEQ ID NO: 1904518 - DNA, 15 bp, Homo sapiens
ttaaactatcagatc

SEQ ID NO: 1904519 - DNA, 15 bp, Homo sapiens
taaactatcagatct

SEQ ID NO: 1904520 - DNA, 15 bp, Homo sapiens
aaactatcagatctc

SEQ ID NO: 1904521 - DNA, 15 bp, Homo sapiens
aactatcagatctca

SEQ ID NO: 1904522 - DNA, 15 bp, Homo sapiens
actatcagatctcac

SEQ ID NO: 1904523 - DNA, 15 bp, Homo sapiens
ctatcagatctcaca

SEQ ID NO: 1904524 - DNA, 15 bp, Homo sapiens
tatcagatctcacaa

SEQ ID NO: 1904525 - DNA, 15 bp, Homo sapiens
atcagatctcacaag

SEQ ID NO: 1904526 - DNA, 15 bp, Homo sapiens
tcagatctcacaaga

SEQ ID NO: 1904527 - DNA, 15 bp, Homo sapiens
cagatctcacaagaa

SEQ ID NO: 1904528 - DNA, 15 bp, Homo sapiens
agatctcacaagaac

SEQ ID NO: 1904529 - DNA, 15 bp, Homo sapiens
gatctcacaagaact

SEQ ID NO: 1904530 - DNA, 15 bp, Homo sapiens
atctcacaagaactc

SEQ ID NO: 1904531 - DNA, 15 bp, Homo sapiens
tctcacaagaactca

SEQ ID NO: 1904532 - DNA, 15 bp, Homo sapiens
ctcacaagaactcac

SEQ ID NO: 1904533 - DNA, 15 bp, Homo sapiens
tcacaagaactcact

SEQ ID NO: 1904534 - DNA, 15 bp, Homo sapiens
cacaagaactcactg

SEQ ID NO: 1904535 - DNA, 15 bp, Homo sapiens
acaagaactcactgt

SEQ ID NO: 1904536 - DNA, 15 bp, Homo sapiens
caagaactcactgtc

SEQ ID NO: 1904537 - DNA, 15 bp, Homo sapiens
aagaactcactgtct

SEQ ID NO: 1904538 - DNA, 15 bp, Homo sapiens
agaactcactgtctc

SEQ ID NO: 1904539 - DNA, 15 bp, Homo sapiens
gaactcactgtctcg

SEQ ID NO: 1904540 - DNA, 15 bp, Homo sapiens
aactcactgtctcga

SEQ ID NO: 1904541 - DNA, 15 bp, Homo sapiens
actcactgtctcgag

SEQ ID NO: 1904542 - DNA, 15 bp, Homo sapiens
ctcactgtctcgagg

SEQ ID NO: 1904543 - DNA, 15 bp, Homo sapiens
tcactgtctcgagga

SEQ ID NO: 1904544 - DNA, 15 bp, Homo sapiens
cactgtctcgaggac

SEQ ID NO: 1904545 - DNA, 15 bp, Homo sapiens
actgtctcgaggaca

SEQ ID NO: 1904546 - DNA, 15 bp, Homo sapiens
ctgtctcgaggacag

SEQ ID NO: 1904547 - DNA, 15 bp, Homo sapiens
tgtctcgaggacagt

SEQ ID NO: 1904548 - DNA, 15 bp, Homo sapiens
gtctcgaggacagta

SEQ ID NO: 1904549 - DNA, 15 bp, Homo sapiens
tctcgaggacagtat

SEQ ID NO: 1904550 - DNA, 15 bp, Homo sapiens
ctcgaggacagtatc

SEQ ID NO: 1904551 - DNA, 15 bp, Homo sapiens
tcgaggacagtatca

SEQ ID NO: 1904552 - DNA, 15 bp, Homo sapiens
cgaggacagtatcaa

SEQ ID NO: 1904553 - DNA, 15 bp, Homo sapiens
gaggacagtatcaac

SEQ ID NO: 1904554 - DNA, 15 bp, Homo sapiens
aggacagtatcaaca

SEQ ID NO: 1904555 - DNA, 15 bp, Homo sapiens
ggacagtatcaacag

SEQ ID NO: 1904556 - DNA, 15 bp, Homo sapiens
gacagtatcaacagg

SEQ ID NO: 1904557 - DNA, 15 bp, Homo sapiens
acagtatcaacaggg

SEQ ID NO: 1904558 - DNA, 15 bp, Homo sapiens
cagtatcaacaggga

SEQ ID NO: 1904559 - DNA, 15 bp, Homo sapiens
agtatcaacagggat

SEQ ID NO: 1904560 - DNA, 15 bp, Homo sapiens
gtatcaacagggatg

SEQ ID NO: 1904561 - DNA, 15 bp, Homo sapiens
tatcaacagggatgg

SEQ ID NO: 1904562 - DNA, 15 bp, Homo sapiens
atcaacagggatggt

SEQ ID NO: 1904563 - DNA, 15 bp, Homo sapiens
tcaacagggatggta

SEQ ID NO: 1904564 - DNA, 15 bp, Homo sapiens
caacagggatggtat

SEQ ID NO: 1904565 - DNA, 15 bp, Homo sapiens
aacagggatggtatt

SEQ ID NO: 1904566 - DNA, 15 bp, Homo sapiens
acagggatggtatta

SEQ ID NO: 1904567 - DNA, 15 bp, Homo sapiens
cagggatggtattaa

SEQ ID NO: 1904568 - DNA, 15 bp, Homo sapiens
agggatggtattaaa

SEQ ID NO: 1904569 - DNA, 15 bp, Homo sapiens
gggatggtattaaac

SEQ ID NO: 1904570 - DNA, 15 bp, Homo sapiens
ggatggtattaaacc

SEQ ID NO: 1904571 - DNA, 15 bp, Homo sapiens
gatggtattaaacca

SEQ ID NO: 1904572 - DNA, 15 bp, Homo sapiens
atggtattaaaccat

SEQ ID NO: 1904573 - DNA, 15 bp, Homo sapiens
tggtattaaaccatt

SEQ ID NO: 1904574 - DNA, 15 bp, Homo sapiens
ggtattaaaccattc

SEQ ID NO: 1904575 - DNA, 15 bp, Homo sapiens
gtattaaaccattca

SEQ ID NO: 1904576 - DNA, 15 bp, Homo sapiens
tattaaaccattcat

SEQ ID NO: 1904577 - DNA, 15 bp, Homo sapiens
attaaaccattcatg

SEQ ID NO: 1904578 - DNA, 15 bp, Homo sapiens
ttaaaccattcatga

SEQ ID NO: 1904579 - DNA, 15 bp, Homo sapiens
taaaccattcatgag

SEQ ID NO: 1904580 - DNA, 15 bp, Homo sapiens
aaaccattcatgaga

SEQ ID NO: 1904581 - DNA, 15 bp, Homo sapiens
aaccattcatgagaa

SEQ ID NO: 1904582 - DNA, 15 bp, Homo sapiens
accattcatgagaaa

SEQ ID NO: 1904583 - DNA, 15 bp, Homo sapiens
ccattcatgagaaac

SEQ ID NO: 1904584 - DNA, 15 bp, Homo sapiens
cattcatgagaaacc

SEQ ID NO: 1904585 - DNA, 15 bp, Homo sapiens
attcatgagaaaccc

SEQ ID NO: 1904586 - DNA, 15 bp, Homo sapiens
tcatgagaaacccac

SEQ ID NO: 1904587 - DNA, 15 bp, Homo sapiens
catgagaaacccacc

SEQ ID NO: 1904588 - DNA, 15 bp, Homo sapiens
atgagaaacccaccc

SEQ ID NO: 1904589 - DNA, 15 bp, Homo sapiens
tgagaaacccacccc

SEQ ID NO: 1904590 - DNA, 15 bp, Homo sapiens
gagaaacccaccccc

SEQ ID NO: 1904591 - DNA, 15 bp, Homo sapiens
agaaacccaccccca

SEQ ID NO: 1904592 - DNA, 15 bp, Homo sapiens
gaaacccacccccat

SEQ ID NO: 1904593 - DNA, 15 bp, Homo sapiens
aaacccacccccatg

SEQ ID NO: 1904594 - DNA, 15 bp, Homo sapiens
aacccacccccatga

SEQ ID NO: 1904595 - DNA, 15 bp, Homo sapiens
acccacccccatgat

SEQ ID NO: 1904596 - DNA, 15 bp, Homo sapiens
cccacccccatgatc

SEQ ID NO: 1904597 - DNA, 15 bp, Homo sapiens
ccacccccatgatcc

SEQ ID NO: 1904598 - DNA, 15 bp, Homo sapiens
cacccccatgatcca

SEQ ID NO: 1904599 - DNA, 15 bp, Homo sapiens
acccccatgatccag

SEQ ID NO: 1904600 - DNA, 15 bp, Homo sapiens
cccccatgatccagt

SEQ ID NO: 1904601 - DNA, 15 bp, Homo sapiens
ccccatgatccagtc

SEQ ID NO: 1904602 - DNA, 15 bp, Homo sapiens
cccatgatccagtca

SEQ ID NO: 1904603 - DNA, 15 bp, Homo sapiens
ccatgatccagtcac

SEQ ID NO: 1904604 - DNA, 15 bp, Homo sapiens
catgatccagtcacc

SEQ ID NO: 1904605 - DNA, 15 bp, Homo sapiens
atgatccagtcacct

SEQ ID NO: 1904606 - DNA, 15 bp, Homo sapiens
tgatccagtcacctt

SEQ ID NO: 1904607 - DNA, 15 bp, Homo sapiens
gatccagtcaccttc

SEQ ID NO: 1904608 - DNA, 15 bp, Homo sapiens
atccagtcaccttcc

SEQ ID NO: 1904609 - DNA, 15 bp, Homo sapiens
tccagtcaccttcca

SEQ ID NO: 1904610 - DNA, 15 bp, Homo sapiens
ccagtcaccttccac

SEQ ID NO: 1904611 - DNA, 15 bp, Homo sapiens
cagtcaccttccacc

SEQ ID NO: 1904612 - DNA, 15 bp, Homo sapiens
agtcaccttccacca

SEQ ID NO: 1904613 - DNA, 15 bp, Homo sapiens
gtcaccttccaccag

SEQ ID NO: 1904614 - DNA, 15 bp, Homo sapiens
tcaccttccaccagg

SEQ ID NO: 1904615 - DNA, 15 bp, Homo sapiens
caccttccaccaggc

SEQ ID NO: 1904616 - DNA, 15 bp, Homo sapiens
accttccaccaggcc

SEQ ID NO: 1904617 - DNA, 15 bp, Homo sapiens
ccttccaccaggccc

SEQ ID NO: 1904618 - DNA, 15 bp, Homo sapiens
cttccaccaggcccc

SEQ ID NO: 1904619 - DNA, 15 bp, Homo sapiens
ttccaccaggcccca

SEQ ID NO: 1904620 - DNA, 15 bp, Homo sapiens
tccaccaggccccac

SEQ ID NO: 1904621 - DNA, 15 bp, Homo sapiens
ccaccaggccccacc

SEQ ID NO: 1904622 - DNA, 15 bp, Homo sapiens
caccaggccccacct

SEQ ID NO: 1904623 - DNA, 15 bp, Homo sapiens
accaggccccacctc

SEQ ID NO: 1904624 - DNA, 15 bp, Homo sapiens
ccaggccccacctca

SEQ ID NO: 1904625 - DNA, 15 bp, Homo sapiens
caggccccacctcaa

SEQ ID NO: 1904626 - DNA, 15 bp, Homo sapiens
aggccccacctcaaa

SEQ ID NO: 1904627 - DNA, 15 bp, Homo sapiens
ggccccacctcaaac

SEQ ID NO: 1904628 - DNA, 15 bp, Homo sapiens
gccccacctcaaaca

SEQ ID NO: 1904629 - DNA, 15 bp, Homo sapiens
ccccacctcaaacag

SEQ ID NO: 1904630 - DNA, 15 bp, Homo sapiens
cccacctcaaacagt

SEQ ID NO: 1904631 - DNA, 15 bp, Homo sapiens
ccacctcaaacagtg

SEQ ID NO: 1904632 - DNA, 15 bp, Homo sapiens
cacctcaaacagtgg

SEQ ID NO: 1904633 - DNA, 15 bp, Homo sapiens
acctcaaacagtggg

SEQ ID NO: 1904634 - DNA, 15 bp, Homo sapiens
cctcaaacagtgggg

SEQ ID NO: 1904635 - DNA, 15 bp, Homo sapiens
ctcaaacagtggggg

SEQ ID NO: 1904636 - DNA, 15 bp, Homo sapiens
tcaaacagtgggggt

SEQ ID NO: 1904637 - DNA, 15 bp, Homo sapiens
caaacagtgggggtt

SEQ ID NO: 1904638 - DNA, 15 bp, Homo sapiens
aaacagtgggggtta

SEQ ID NO: 1904639 - DNA, 15 bp, Homo sapiens
aacagtgggggttac

SEQ ID NO: 1904640 - DNA, 15 bp, Homo sapiens
acagtgggggttaca

SEQ ID NO: 1904641 - DNA, 15 bp, Homo sapiens
cagtgggggttacat

SEQ ID NO: 1904642 - DNA, 15 bp, Homo sapiens
agtgggggttacatt

SEQ ID NO: 1904643 - DNA, 15 bp, Homo sapiens
gtgggggttacattt

SEQ ID NO: 1904644 - DNA, 15 bp, Homo sapiens
tgggggttacatttc

SEQ ID NO: 1904645 - DNA, 15 bp, Homo sapiens
gggggttacatttca

SEQ ID NO: 1904646 - DNA, 15 bp, Homo sapiens
ggggttacatttcag

SEQ ID NO: 1904647 - DNA, 15 bp, Homo sapiens
gggttacatttcagt

SEQ ID NO: 1904648 - DNA, 15 bp, Homo sapiens
ggttacatttcagta

SEQ ID NO: 1904649 - DNA, 15 bp, Homo sapiens
gttacatttcagtat

SEQ ID NO: 1904650 - DNA, 15 bp, Homo sapiens
ttacatttcagtatg

SEQ ID NO: 1904651 - DNA, 15 bp, Homo sapiens
tacatttcagtatga

SEQ ID NO: 1904652 - DNA, 15 bp, Homo sapiens
acatttcagtatgag

SEQ ID NO: 1904653 - DNA, 15 bp, Homo sapiens
catttcagtatgaga

SEQ ID NO: 1904654 - DNA, 15 bp, Homo sapiens
atttcagtatgagat

SEQ ID NO: 1904655 - DNA, 15 bp, Homo sapiens
tttcagtatgagatt

SEQ ID NO: 1904656 - DNA, 15 bp, Homo sapiens
ttcagtatgagattt

SEQ ID NO: 1904657 - DNA, 15 bp, Homo sapiens
tcagtatgagatttg

SEQ ID NO: 1904658 - DNA, 15 bp, Homo sapiens
cagtatgagatttgg

SEQ ID NO: 1904659 - DNA, 15 bp, Homo sapiens
agtatgagatttggg

SEQ ID NO: 1904660 - DNA, 15 bp, Homo sapiens
gtatgagatttgggc

SEQ ID NO: 1904661 - DNA, 15 bp, Homo sapiens
tatgagatttgggca

SEQ ID NO: 1904662 - DNA, 15 bp, Homo sapiens
atgagatttgggcag

SEQ ID NO: 1904663 - DNA, 15 bp, Homo sapiens
tgagatttgggcagg

SEQ ID NO: 1904664 - DNA, 15 bp, Homo sapiens
gagatttgggcaggg

SEQ ID NO: 1904665 - DNA, 15 bp, Homo sapiens
agatttgggcaggga

SEQ ID NO: 1904666 - DNA, 15 bp, Homo sapiens
gatttgggcagggat

SEQ ID NO: 1904667 - DNA, 15 bp, Homo sapiens
atttgggcagggatg

SEQ ID NO: 1904668 - DNA, 15 bp, Homo sapiens
tttgggcagggatgt

SEQ ID NO: 1904669 - DNA, 15 bp, Homo sapiens
ttgggcagggatgta

SEQ ID NO: 1904670 - DNA, 15 bp, Homo sapiens
tgggcagggatgtag

SEQ ID NO: 1904671 - DNA, 15 bp, Homo sapiens
gggcagggatgtaga

SEQ ID NO: 1904672 - DNA, 15 bp, Homo sapiens
ggcagggatgtagat

SEQ ID NO: 1904673 - DNA, 15 bp, Homo sapiens
gcagggatgtagatc

SEQ ID NO: 1904674 - DNA, 15 bp, Homo sapiens
cagggatgtagatcc

SEQ ID NO: 1904675 - DNA, 15 bp, Homo sapiens
agggatgtagatcca

SEQ ID NO: 1904676 - DNA, 15 bp, Homo sapiens
gggatgtagatccaa

SEQ ID NO: 1904677 - DNA, 15 bp, Homo sapiens
ggatgtagatccaaa

SEQ ID NO: 1904678 - DNA, 15 bp, Homo sapiens
gatgtagatccaaac

SEQ ID NO: 1904679 - DNA, 15 bp, Homo sapiens
atgtagatccaaact

SEQ ID NO: 1904680 - DNA, 15 bp, Homo sapiens
tgtagatccaaacta

SEQ ID NO: 1904681 - DNA, 15 bp, Homo sapiens
gtagatccaaactag

SEQ ID NO: 1904682 - DNA, 15 bp, Homo sapiens
tagatccaaactaga

SEQ ID NO: 1904683 - DNA, 15 bp, Homo sapiens
agatccaaactagat

SEQ ID NO: 1904684 - DNA, 15 bp, Homo sapiens
gatccaaactagatc

SEQ ID NO: 1904685 - DNA, 15 bp, Homo sapiens
atccaaactagatca

SEQ ID NO: 1904686 - DNA, 15 bp, Homo sapiens
tccaaactagatcac

SEQ ID NO: 1904687 - DNA, 15 bp, Homo sapiens
ccaaactagatcaca

SEQ ID NO: 1904688 - DNA, 15 bp, Homo sapiens
caaactagatcacag

SEQ ID NO: 1904689 - DNA, 15 bp, Homo sapiens
aaactagatcacagg

SEQ ID NO: 1904690 - DNA, 15 bp, Homo sapiens
aactagatcacagga

SEQ ID NO: 1904691 - DNA, 15 bp, Homo sapiens
catgtgctatttgac

SEQ ID NO: 1904692 - DNA, 15 bp, Homo sapiens
atgtgctatttgaca

SEQ ID NO: 1904693 - DNA, 15 bp, Homo sapiens
tgtgctatttgacat

SEQ ID NO: 1904694 - DNA, 15 bp, Homo sapiens
gtgctatttgacatt

SEQ ID NO: 1904695 - DNA, 15 bp, Homo sapiens
tgctatttgacattt

SEQ ID NO: 1904696 - DNA, 15 bp, Homo sapiens
gctatttgacatttt

SEQ ID NO: 1904697 - DNA, 15 bp, Homo sapiens
ctatttgacattttc

SEQ ID NO: 1904698 - DNA, 15 bp, Homo sapiens
tatttgacattttcc

SEQ ID NO: 1904699 - DNA, 15 bp, Homo sapiens
atttgacattttcca

SEQ ID NO: 1904700 - DNA, 15 bp, Homo sapiens
tttgacattttccaa

SEQ ID NO: 1904701 - DNA, 15 bp, Homo sapiens
cattttccaaggtac

SEQ ID NO: 1904702 - DNA, 15 bp, Homo sapiens
attttccaaggtacc

SEQ ID NO: 1904703 - DNA, 15 bp, Homo sapiens
ttttccaaggtacca

SEQ ID NO: 1904704 - DNA, 15 bp, Homo sapiens
tttccaaggtaccag

SEQ ID NO: 1904705 - DNA, 15 bp, Homo sapiens
ttccaaggtaccagc

SEQ ID NO: 1904706 - DNA, 15 bp, Homo sapiens
tccaaggtaccagcc

SEQ ID NO: 1904707 - DNA, 15 bp, Homo sapiens
ccaaggtaccagcct

SEQ ID NO: 1904708 - DNA, 15 bp, Homo sapiens
caaggtaccagcctc

SEQ ID NO: 1904709 - DNA, 15 bp, Homo sapiens
aaggtaccagcctcc

SEQ ID NO: 1904710 - DNA, 15 bp, Homo sapiens
aggtaccagcctccc

SEQ ID NO: 1904711 - DNA, 15 bp, Homo sapiens
ggtaccagcctcccc

SEQ ID NO: 1904712 - DNA, 15 bp, Homo sapiens
gtaccagcctcccct

SEQ ID NO: 1904713 - DNA, 15 bp, Homo sapiens
taccagcctcccctt

SEQ ID NO: 1904714 - DNA, 15 bp, Homo sapiens
accagcctccccttc

SEQ ID NO: 1904715 - DNA, 15 bp, Homo sapiens
ccagcctccccttct

SEQ ID NO: 1904716 - DNA, 15 bp, Homo sapiens
cagcctccccttctc

SEQ ID NO: 1904717 - DNA, 15 bp, Homo sapiens
agcctccccttctcc

SEQ ID NO: 1904718 - DNA, 15 bp, Homo sapiens
gcctccccttctccc

SEQ ID NO: 1904719 - DNA, 15 bp, Homo sapiens
cctccccttctcccc

SEQ ID NO: 1904720 - DNA, 15 bp, Homo sapiens
ctccccttctcccca

SEQ ID NO: 1904721 - DNA, 15 bp, Homo sapiens
tccccttctccccaa

SEQ ID NO: 1904722 - DNA, 15 bp, Homo sapiens
ccccttctccccaag

SEQ ID NO: 1904723 - DNA, 15 bp, Homo sapiens
cccttctccccaaga

SEQ ID NO: 1904724 - DNA, 15 bp, Homo sapiens
ccttctccccaagat

SEQ ID NO: 1904725 - DNA, 15 bp, Homo sapiens
cttctccccaagata

SEQ ID NO: 1904726 - DNA, 15 bp, Homo sapiens
ttctccccaagataa

SEQ ID NO: 1904727 - DNA, 15 bp, Homo sapiens
tctccccaagataat

SEQ ID NO: 1904728 - DNA, 15 bp, Homo sapiens
ctccccaagataata

SEQ ID NO: 1904729 - DNA, 15 bp, Homo sapiens
tccccaagataatat

SEQ ID NO: 1904730 - DNA, 15 bp, Homo sapiens
ccccaagataatatc

SEQ ID NO: 1904731 - DNA, 15 bp, Homo sapiens
cccaagataatatct

SEQ ID NO: 1904732 - DNA, 15 bp, Homo sapiens
ccaagataatatctt

SEQ ID NO: 1904733 - DNA, 15 bp, Homo sapiens
caagataatatcttt

SEQ ID NO: 1904734 - DNA, 15 bp, Homo sapiens
aagataatatctttt

SEQ ID NO: 1904735 - DNA, 15 bp, Homo sapiens
agataatatctttta

SEQ ID NO: 1904736 - DNA, 15 bp, Homo sapiens
gataatatcttttaa

SEQ ID NO: 1904737 - DNA, 15 bp, Homo sapiens
ataatatcttttaat

SEQ ID NO: 1904738 - DNA, 15 bp, Homo sapiens
taatatcttttaata

SEQ ID NO: 1904739 - DNA, 15 bp, Homo sapiens
aatatcttttaatat

SEQ ID NO: 1904740 - DNA, 15 bp, Homo sapiens
atatcttttaatatg

SEQ ID NO: 1904741 - DNA, 15 bp, Homo sapiens
tatcttttaatatgg

SEQ ID NO: 1904742 - DNA, 15 bp, Homo sapiens
atcttttaatatgga

SEQ ID NO: 1904743 - DNA, 15 bp, Homo sapiens
tcttttaatatggaa

SEQ ID NO: 1904744 - DNA, 15 bp, Homo sapiens
cttttaatatggaat

SEQ ID NO: 1904745 - DNA, 15 bp, Homo sapiens
ttttaatatggaatt

SEQ ID NO: 1904746 - DNA, 15 bp, Homo sapiens
tttaatatggaattt

SEQ ID NO: 1904747 - DNA, 15 bp, Homo sapiens
ttaatatggaatttc

SEQ ID NO: 1904748 - DNA, 15 bp, Homo sapiens
taatatggaatttca

SEQ ID NO: 1904749 - DNA, 15 bp, Homo sapiens
aatatggaatttcat

SEQ ID NO: 1904750 - DNA, 15 bp, Homo sapiens
atatggaatttcatc

SEQ ID NO: 1904751 - DNA, 15 bp, Homo sapiens
tatggaatttcatcc

SEQ ID NO: 1904752 - DNA, 15 bp, Homo sapiens
atggaatttcatccc

SEQ ID NO: 1904753 - DNA, 15 bp, Homo sapiens
tggaatttcatccct

SEQ ID NO: 1904754 - DNA, 15 bp, Homo sapiens
ggaatttcatcccta

SEQ ID NO: 1904755 - DNA, 15 bp, Homo sapiens
gaatttcatccctag

SEQ ID NO: 1904756 - DNA, 15 bp, Homo sapiens
aatttcatccctagg

SEQ ID NO: 1904757 - DNA, 15 bp, Homo sapiens
atttcatccctaggg

SEQ ID NO: 1904758 - DNA, 15 bp, Homo sapiens
tttcatccctagggc

SEQ ID NO: 1904759 - DNA, 15 bp, Homo sapiens
ttcatccctagggca

SEQ ID NO: 1904760 - DNA, 15 bp, Homo sapiens
tcatccctagggcag

SEQ ID NO: 1904761 - DNA, 15 bp, Homo sapiens
catccctagggcagg

SEQ ID NO: 1904762 - DNA, 15 bp, Homo sapiens
atccctagggcagga

SEQ ID NO: 1904763 - DNA, 15 bp, Homo sapiens
tccctagggcaggac

SEQ ID NO: 1904764 - DNA, 15 bp, Homo sapiens
ccctagggcaggact

SEQ ID NO: 1904765 - DNA, 15 bp, Homo sapiens
cctagggcaggactt

SEQ ID NO: 1904766 - DNA, 15 bp, Homo sapiens
ctagggcaggacttt

SEQ ID NO: 1904767 - DNA, 15 bp, Homo sapiens
tagggcaggactttt

SEQ ID NO: 1904768 - DNA, 15 bp, Homo sapiens
agggcaggacttttt

SEQ ID NO: 1904769 - DNA, 15 bp, Homo sapiens
gggcaggactttttt

SEQ ID NO: 1904770 - DNA, 15 bp, Homo sapiens
ggcaggacttttttt

SEQ ID NO: 1904771 - DNA, 15 bp, Homo sapiens
gcaggactttttttt

SEQ ID NO: 1904772 - DNA, 15 bp, Homo sapiens
caggacttttttttt

SEQ ID NO: 1904773 - DNA, 15 bp, Homo sapiens
aggacttttttttta

SEQ ID NO: 1904774 - DNA, 15 bp, Homo sapiens
ggactttttttttat

SEQ ID NO: 1904775 - DNA, 15 bp, Homo sapiens
gactttttttttatt

SEQ ID NO: 1904776 - DNA, 15 bp, Homo sapiens
actttttttttatta

SEQ ID NO: 1904777 - DNA, 15 bp, Homo sapiens
ctttttttttattat

SEQ ID NO: 1904778 - DNA, 15 bp, Homo sapiens
tttttttttattatc

SEQ ID NO: 1904779 - DNA, 15 bp, Homo sapiens
ttttttttattatcc

SEQ ID NO: 1904780 - DNA, 15 bp, Homo sapiens
tttttttattatccc

SEQ ID NO: 1904781 - DNA, 15 bp, Homo sapiens
ttttttattatccct

SEQ ID NO: 1904782 - DNA, 15 bp, Homo sapiens
tttttattatccctc

SEQ ID NO: 1904783 - DNA, 15 bp, Homo sapiens
ttttattatccctca

SEQ ID NO: 1904784 - DNA, 15 bp, Homo sapiens
tttattatccctcag

SEQ ID NO: 1904785 - DNA, 15 bp, Homo sapiens
ttattatccctcaga

SEQ ID NO: 1904786 - DNA, 15 bp, Homo sapiens
tattatccctcagaa

SEQ ID NO: 1904787 - DNA, 15 bp, Homo sapiens
attatccctcagaaa

SEQ ID NO: 1904788 - DNA, 15 bp, Homo sapiens
ttatccctcagaaat

SEQ ID NO: 1904789 - DNA, 15 bp, Homo sapiens
tatccctcagaaata

SEQ ID NO: 1904790 - DNA, 15 bp, Homo sapiens
atccctcagaaatat

SEQ ID NO: 1904791 - DNA, 15 bp, Homo sapiens
tccctcagaaatata

SEQ ID NO: 1904792 - DNA, 15 bp, Homo sapiens
ccctcagaaatatac

SEQ ID NO: 1904793 - DNA, 15 bp, Homo sapiens
cctcagaaatatact

SEQ ID NO: 1904794 - DNA, 15 bp, Homo sapiens
ctcagaaatatactg

SEQ ID NO: 1904795 - DNA, 15 bp, Homo sapiens
tcagaaatatactgg

SEQ ID NO: 1904796 - DNA, 15 bp, Homo sapiens
cagaaatatactgga

SEQ ID NO: 1904797 - DNA, 15 bp, Homo sapiens
agaaatatactggac

SEQ ID NO: 1904798 - DNA, 15 bp, Homo sapiens
gaaatatactggaca

SEQ ID NO: 1904799 - DNA, 15 bp, Homo sapiens
aaatatactggacac

SEQ ID NO: 1904800 - DNA, 15 bp, Homo sapiens
aatatactggacacc

SEQ ID NO: 1904801 - DNA, 15 bp, Homo sapiens
atatactggacacca

SEQ ID NO: 1904802 - DNA, 15 bp, Homo sapiens
tatactggacaccac

SEQ ID NO: 1904803 - DNA, 15 bp, Homo sapiens
atactggacaccacg

SEQ ID NO: 1904804 - DNA, 15 bp, Homo sapiens
tactggacaccacgt

SEQ ID NO: 1904805 - DNA, 15 bp, Homo sapiens
actggacaccacgtt

SEQ ID NO: 1904806 - DNA, 15 bp, Homo sapiens
ctggacaccacgttt

SEQ ID NO: 1904807 - DNA, 15 bp, Homo sapiens
tggacaccacgttta

SEQ ID NO: 1904808 - DNA, 15 bp, Homo sapiens
ggacaccacgtttaa

SEQ ID NO: 1904809 - DNA, 15 bp, Homo sapiens
gacaccacgtttaag

SEQ ID NO: 1904810 - DNA, 15 bp, Homo sapiens
acaccacgtttaagt

SEQ ID NO: 1904811 - DNA, 15 bp, Homo sapiens
caccacgtttaagta

SEQ ID NO: 1904812 - DNA, 15 bp, Homo sapiens
accacgtttaagtag

SEQ ID NO: 1904813 - DNA, 15 bp, Homo sapiens
ccacgtttaagtaga

SEQ ID NO: 1904814 - DNA, 15 bp, Homo sapiens
cacgtttaagtagac

SEQ ID NO: 1904815 - DNA, 15 bp, Homo sapiens
acgtttaagtagaca

SEQ ID NO: 1904816 - DNA, 15 bp, Homo sapiens
cgtttaagtagacat

SEQ ID NO: 1904817 - DNA, 15 bp, Homo sapiens
gtttaagtagacatc

SEQ ID NO: 1904818 - DNA, 15 bp, Homo sapiens
tttaagtagacatcc

SEQ ID NO: 1904819 - DNA, 15 bp, Homo sapiens
ttaagtagacatcca

SEQ ID NO: 1904820 - DNA, 15 bp, Homo sapiens
taagtagacatccaa

SEQ ID NO: 1904821 - DNA, 15 bp, Homo sapiens
aagtagacatccaac

SEQ ID NO: 1904822 - DNA, 15 bp, Homo sapiens
agtagacatccaaca

SEQ ID NO: 1904823 - DNA, 15 bp, Homo sapiens
gtagacatccaacat

SEQ ID NO: 1904824 - DNA, 15 bp, Homo sapiens
tagacatccaacatc

SEQ ID NO: 1904825 - DNA, 15 bp, Homo sapiens
agacatccaacatct

SEQ ID NO: 1904826 - DNA, 15 bp, Homo sapiens
gacatccaacatctg

SEQ ID NO: 1904827 - DNA, 15 bp, Homo sapiens
acatccaacatctgc

SEQ ID NO: 1904828 - DNA, 15 bp, Homo sapiens
catccaacatctgct

SEQ ID NO: 1904829 - DNA, 15 bp, Homo sapiens
atccaacatctgctg

SEQ ID NO: 1904830 - DNA, 15 bp, Homo sapiens
tccaacatctgctgt

SEQ ID NO: 1904831 - DNA, 15 bp, Homo sapiens
ccaacatctgctgtc

SEQ ID NO: 1904832 - DNA, 15 bp, Homo sapiens
caacatctgctgtca

SEQ ID NO: 1904833 - DNA, 15 bp, Homo sapiens
aacatctgctgtcat

SEQ ID NO: 1904834 - DNA, 15 bp, Homo sapiens
acatctgctgtcata

SEQ ID NO: 1904835 - DNA, 15 bp, Homo sapiens
catctgctgtcataa

SEQ ID NO: 1904836 - DNA, 15 bp, Homo sapiens
atctgctgtcataaa

SEQ ID NO: 1904837 - DNA, 15 bp, Homo sapiens
tctgctgtcataaat

SEQ ID NO: 1904838 - DNA, 15 bp, Homo sapiens
ctgctgtcataaatt

SEQ ID NO: 1904839 - DNA, 15 bp, Homo sapiens
tgctgtcataaattg

SEQ ID NO: 1904840 - DNA, 15 bp, Homo sapiens
gctgtcataaattgt

SEQ ID NO: 1904841 - DNA, 15 bp, Homo sapiens
ctgtcataaattgtt

SEQ ID NO: 1904842 - DNA, 15 bp, Homo sapiens
tgtcataaattgttt

SEQ ID NO: 1904843 - DNA, 15 bp, Homo sapiens
gtcataaattgtttt

SEQ ID NO: 1904844 - DNA, 15 bp, Homo sapiens
tcataaattgttttg

SEQ ID NO: 1904845 - DNA, 15 bp, Homo sapiens
cataaattgttttga

SEQ ID NO: 1904846 - DNA, 15 bp, Homo sapiens
ataaattgttttgaa

SEQ ID NO: 1904847 - DNA, 15 bp, Homo sapiens
taaattgttttgaat

SEQ ID NO: 1904848 - DNA, 15 bp, Homo sapiens
aaattgttttgaatt

SEQ ID NO: 1904849 - DNA, 15 bp, Homo sapiens
aattgttttgaattt

SEQ ID NO: 1904850 - DNA, 15 bp, Homo sapiens
attgttttgaatttt

SEQ ID NO: 1904851 - DNA, 15 bp, Homo sapiens
ttgttttgaattttt

SEQ ID NO: 1904852 - DNA, 15 bp, Homo sapiens
tgttttgaatttttt

SEQ ID NO: 1904853 - DNA, 15 bp, Homo sapiens
gttttgaattttttg

SEQ ID NO: 1904854 - DNA, 15 bp, Homo sapiens
ttttgaattttttga

SEQ ID NO: 1904855 - DNA, 15 bp, Homo sapiens
tttgaattttttgac

SEQ ID NO: 1904856 - DNA, 15 bp, Homo sapiens
ttgaattttttgaca

SEQ ID NO: 1904857 - DNA, 15 bp, Homo sapiens
tgaattttttgacat

SEQ ID NO: 1904858 - DNA, 15 bp, Homo sapiens
gaattttttgacata

SEQ ID NO: 1904859 - DNA, 15 bp, Homo sapiens
aattttttgacatac

SEQ ID NO: 1904860 - DNA, 15 bp, Homo sapiens
attttttgacatact

SEQ ID NO: 1904861 - DNA, 15 bp, Homo sapiens
ttttttgacatactt

SEQ ID NO: 1904862 - DNA, 15 bp, Homo sapiens
tttttgacatacttg

SEQ ID NO: 1904863 - DNA, 15 bp, Homo sapiens
ttttgacatacttgc

SEQ ID NO: 1904864 - DNA, 15 bp, Homo sapiens
tttgacatacttgcc

SEQ ID NO: 1904865 - DNA, 15 bp, Homo sapiens
ttgacatacttgccc

SEQ ID NO: 1904866 - DNA, 15 bp, Homo sapiens
tgacatacttgccca

SEQ ID NO: 1904867 - DNA, 15 bp, Homo sapiens
gacatacttgcccat

SEQ ID NO: 1904868 - DNA, 15 bp, Homo sapiens
acatacttgcccatg

SEQ ID NO: 1904869 - DNA, 15 bp, Homo sapiens
catacttgcccatga

SEQ ID NO: 1904870 - DNA, 15 bp, Homo sapiens
atacttgcccatgag

SEQ ID NO: 1904871 - DNA, 15 bp, Homo sapiens
tacttgcccatgagg

SEQ ID NO: 1904872 - DNA, 15 bp, Homo sapiens
acttgcccatgaggt

SEQ ID NO: 1904873 - DNA, 15 bp, Homo sapiens
cttgcccatgaggtt

SEQ ID NO: 1904874 - DNA, 15 bp, Homo sapiens
ttgcccatgaggttt

SEQ ID NO: 1904875 - DNA, 15 bp, Homo sapiens
tgcccatgaggtttt

SEQ ID NO: 1904876 - DNA, 15 bp, Homo sapiens
gcccatgaggttttt

SEQ ID NO: 1904877 - DNA, 15 bp, Homo sapiens
cccatgaggtttttg

SEQ ID NO: 1904878 - DNA, 15 bp, Homo sapiens
ccatgaggtttttga

SEQ ID NO: 1904879 - DNA, 15 bp, Homo sapiens
catgaggtttttgaa

SEQ ID NO: 1904880 - DNA, 15 bp, Homo sapiens
atgaggtttttgaag

SEQ ID NO: 1904881 - DNA, 15 bp, Homo sapiens
tgaggtttttgaagg

SEQ ID NO: 1904882 - DNA, 15 bp, Homo sapiens
gaggtttttgaaggc

SEQ ID NO: 1904883 - DNA, 15 bp, Homo sapiens
aggtttttgaaggca

SEQ ID NO: 1904884 - DNA, 15 bp, Homo sapiens
ggtttttgaaggcat

SEQ ID NO: 1904885 - DNA, 15 bp, Homo sapiens
gtttttgaaggcata

SEQ ID NO: 1904886 - DNA, 15 bp, Homo sapiens
tttttgaaggcatag

SEQ ID NO: 1904887 - DNA, 15 bp, Homo sapiens
ttttgaaggcataga

SEQ ID NO: 1904888 - DNA, 15 bp, Homo sapiens
tttgaaggcatagac

SEQ ID NO: 1904889 - DNA, 15 bp, Homo sapiens
ttgaaggcatagacc

SEQ ID NO: 1904890 - DNA, 15 bp, Homo sapiens
tgaaggcatagacca

SEQ ID NO: 1904891 - DNA, 15 bp, Homo sapiens
gaaggcatagaccat

SEQ ID NO: 1904892 - DNA, 15 bp, Homo sapiens
aaggcatagaccatg

SEQ ID NO: 1904893 - DNA, 15 bp, Homo sapiens
aggcatagaccatgt

SEQ ID NO: 1904894 - DNA, 15 bp, Homo sapiens
ggcatagaccatgtc

SEQ ID NO: 1904895 - DNA, 15 bp, Homo sapiens
gcatagaccatgtct

SEQ ID NO: 1904896 - DNA, 15 bp, Homo sapiens
catagaccatgtctt

SEQ ID NO: 1904897 - DNA, 15 bp, Homo sapiens
atagaccatgtctta

SEQ ID NO: 1904898 - DNA, 15 bp, Homo sapiens
tagaccatgtcttag

SEQ ID NO: 1904899 - DNA, 15 bp, Homo sapiens
agaccatgtcttagc

SEQ ID NO: 1904900 - DNA, 15 bp, Homo sapiens
gaccatgtcttagct

SEQ ID NO: 1904901 - DNA, 15 bp, Homo sapiens
accatgtcttagctg

SEQ ID NO: 1904902 - DNA, 15 bp, Homo sapiens
ccatgtcttagctga

SEQ ID NO: 1904903 - DNA, 15 bp, Homo sapiens
catgtcttagctgaa

SEQ ID NO: 1904904 - DNA, 15 bp, Homo sapiens
atgtcttagctgaac

SEQ ID NO: 1904905 - DNA, 15 bp, Homo sapiens
tgtcttagctgaaca

SEQ ID NO: 1904906 - DNA, 15 bp, Homo sapiens
gtcttagctgaacat

SEQ ID NO: 1904907 - DNA, 15 bp, Homo sapiens
tcttagctgaacatg

SEQ ID NO: 1904908 - DNA, 15 bp, Homo sapiens
cttagctgaacatgt

SEQ ID NO: 1904909 - DNA, 15 bp, Homo sapiens
ttagctgaacatgtg

SEQ ID NO: 1904910 - DNA, 15 bp, Homo sapiens
agctgaacatgtggt

SEQ ID NO: 1904911 - DNA, 15 bp, Homo sapiens
gctgaacatgtggtc

SEQ ID NO: 1904912 - DNA, 15 bp, Homo sapiens
ctgaacatgtggtct

SEQ ID NO: 1904913 - DNA, 15 bp, Homo sapiens
tgaacatgtggtctc

SEQ ID NO: 1904914 - DNA, 15 bp, Homo sapiens
gaacatgtggtctct

SEQ ID NO: 1904915 - DNA, 15 bp, Homo sapiens
aacatgtggtctctt

SEQ ID NO: 1904916 - DNA, 15 bp, Homo sapiens
acatgtggtctctta

SEQ ID NO: 1904917 - DNA, 15 bp, Homo sapiens
catgtggtctcttag

SEQ ID NO: 1904918 - DNA, 15 bp, Homo sapiens
atgtggtctcttagt

SEQ ID NO: 1904919 - DNA, 15 bp, Homo sapiens
tgtggtctcttagtg

SEQ ID NO: 1904920 - DNA, 15 bp, Homo sapiens
gtggtctcttagtgc

SEQ ID NO: 1904921 - DNA, 15 bp, Homo sapiens
tggtctcttagtgcc

SEQ ID NO: 1904922 - DNA, 15 bp, Homo sapiens
ggtctcttagtgcca

SEQ ID NO: 1904923 - DNA, 15 bp, Homo sapiens
gtctcttagtgccat

SEQ ID NO: 1904924 - DNA, 15 bp, Homo sapiens
tctcttagtgccata

SEQ ID NO: 1904925 - DNA, 15 bp, Homo sapiens
ctcttagtgccataa

SEQ ID NO: 1904926 - DNA, 15 bp, Homo sapiens
tcttagtgccataaa

SEQ ID NO: 1904927 - DNA, 15 bp, Homo sapiens
cttagtgccataaag

SEQ ID NO: 1904928 - DNA, 15 bp, Homo sapiens
ttagtgccataaagg

SEQ ID NO: 1904929 - DNA, 15 bp, Homo sapiens
tagtgccataaaggg

SEQ ID NO: 1904930 - DNA, 15 bp, Homo sapiens
agtgccataaagggg

SEQ ID NO: 1904931 - DNA, 15 bp, Homo sapiens
gtgccataaaggggg

SEQ ID NO: 1904932 - DNA, 15 bp, Homo sapiens
tgccataaagggggt

SEQ ID NO: 1904933 - DNA, 15 bp, Homo sapiens
gccataaagggggtt

SEQ ID NO: 1904934 - DNA, 15 bp, Homo sapiens
ccataaagggggttt

SEQ ID NO: 1904935 - DNA, 15 bp, Homo sapiens
cataaagggggttta

SEQ ID NO: 1904936 - DNA, 15 bp, Homo sapiens
ataaagggggtttat

SEQ ID NO: 1904937 - DNA, 15 bp, Homo sapiens
taaagggggtttatg

SEQ ID NO: 1904938 - DNA, 15 bp, Homo sapiens
aaagggggtttatgg

SEQ ID NO: 1904939 - DNA, 15 bp, Homo sapiens
aagggggtttatggt

SEQ ID NO: 1904940 - DNA, 15 bp, Homo sapiens
agggggtttatggta

SEQ ID NO: 1904941 - DNA, 15 bp, Homo sapiens
gggggtttatggtat

SEQ ID NO: 1904942 - DNA, 15 bp, Homo sapiens
ggggtttatggtatg

SEQ ID NO: 1904943 - DNA, 15 bp, Homo sapiens
gggtttatggtatga

SEQ ID NO: 1904944 - DNA, 15 bp, Homo sapiens
ggtttatggtatgac

SEQ ID NO: 1904945 - DNA, 15 bp, Homo sapiens
gtttatggtatgacc

SEQ ID NO: 1904946 - DNA, 15 bp, Homo sapiens
tttatggtatgacct

SEQ ID NO: 1904947 - DNA, 15 bp, Homo sapiens
ttatggtatgacctg

SEQ ID NO: 1904948 - DNA, 15 bp, Homo sapiens
tatggtatgacctgt

SEQ ID NO: 1904949 - DNA, 15 bp, Homo sapiens
atggtatgacctgtg

SEQ ID NO: 1904950 - DNA, 15 bp, Homo sapiens
tggtatgacctgtgt

SEQ ID NO: 1904951 - DNA, 15 bp, Homo sapiens
ggtatgacctgtgta

SEQ ID NO: 1904952 - DNA, 15 bp, Homo sapiens
gtatgacctgtgtag

SEQ ID NO: 1904953 - DNA, 15 bp, Homo sapiens
tatgacctgtgtagt

SEQ ID NO: 1904954 - DNA, 15 bp, Homo sapiens
atgacctgtgtagtg

SEQ ID NO: 1904955 - DNA, 15 bp, Homo sapiens
tgacctgtgtagtgt

SEQ ID NO: 1904956 - DNA, 15 bp, Homo sapiens
gacctgtgtagtgtc

SEQ ID NO: 1904957 - DNA, 15 bp, Homo sapiens
acctgtgtagtgtca

SEQ ID NO: 1904958 - DNA, 15 bp, Homo sapiens
cctgtgtagtgtcac

SEQ ID NO: 1904959 - DNA, 15 bp, Homo sapiens
ctgtgtagtgtcacc

SEQ ID NO: 1904960 - DNA, 15 bp, Homo sapiens
tgtgtagtgtcacct

SEQ ID NO: 1904961 - DNA, 15 bp, Homo sapiens
gtgtagtgtcacctg

SEQ ID NO: 1904962 - DNA, 15 bp, Homo sapiens
tgtagtgtcacctgt

SEQ ID NO: 1904963 - DNA, 15 bp, Homo sapiens
gtagtgtcacctgtg

SEQ ID NO: 1904964 - DNA, 15 bp, Homo sapiens
tagtgtcacctgtgt

SEQ ID NO: 1904965 - DNA, 15 bp, Homo sapiens
agtgtcacctgtgta

SEQ ID NO: 1904966 - DNA, 15 bp, Homo sapiens
gtgtcacctgtgtag

SEQ ID NO: 1904967 - DNA, 15 bp, Homo sapiens
tgtcacctgtgtagt

SEQ ID NO: 1904968 - DNA, 15 bp, Homo sapiens
gtcacctgtgtagtg

SEQ ID NO: 1904969 - DNA, 15 bp, Homo sapiens
tcacctgtgtagtga

SEQ ID NO: 1904970 - DNA, 15 bp, Homo sapiens
cacctgtgtagtgac

SEQ ID NO: 1904971 - DNA, 15 bp, Homo sapiens
acctgtgtagtgaca

SEQ ID NO: 1904972 - DNA, 15 bp, Homo sapiens
cctgtgtagtgacag

SEQ ID NO: 1904973 - DNA, 15 bp, Homo sapiens
ctgtgtagtgacagc

SEQ ID NO: 1904974 - DNA, 15 bp, Homo sapiens
tgtgtagtgacagca

SEQ ID NO: 1904975 - DNA, 15 bp, Homo sapiens
gtgtagtgacagcac

SEQ ID NO: 1904976 - DNA, 15 bp, Homo sapiens
tgtagtgacagcacc

SEQ ID NO: 1904977 - DNA, 15 bp, Homo sapiens
gtagtgacagcacca

SEQ ID NO: 1904978 - DNA, 15 bp, Homo sapiens
tagtgacagcaccac

SEQ ID NO: 1904979 - DNA, 15 bp, Homo sapiens
agtgacagcaccact

SEQ ID NO: 1904980 - DNA, 15 bp, Homo sapiens
gtgacagcaccactg

SEQ ID NO: 1904981 - DNA, 15 bp, Homo sapiens
tgacagcaccactgc

SEQ ID NO: 1904982 - DNA, 15 bp, Homo sapiens
gacagcaccactgcc

SEQ ID NO: 1904983 - DNA, 15 bp, Homo sapiens
acagcaccactgcct

SEQ ID NO: 1904984 - DNA, 15 bp, Homo sapiens
cagcaccactgcctc

SEQ ID NO: 1904985 - DNA, 15 bp, Homo sapiens
agcaccactgcctct

SEQ ID NO: 1904986 - DNA, 15 bp, Homo sapiens
gcaccactgcctctg

SEQ ID NO: 1904987 - DNA, 15 bp, Homo sapiens
caccactgcctctgt

SEQ ID NO: 1904988 - DNA, 15 bp, Homo sapiens
accactgcctctgtt

SEQ ID NO: 1904989 - DNA, 15 bp, Homo sapiens
ccactgcctctgttt

SEQ ID NO: 1904990 - DNA, 15 bp, Homo sapiens
cactgcctctgtttc

SEQ ID NO: 1904991 - DNA, 15 bp, Homo sapiens
actgcctctgtttcc

SEQ ID NO: 1904992 - DNA, 15 bp, Homo sapiens
ctgcctctgtttccc

SEQ ID NO: 1904993 - DNA, 15 bp, Homo sapiens
tgcctctgtttccct

SEQ ID NO: 1904994 - DNA, 15 bp, Homo sapiens
gcctctgtttccctt

SEQ ID NO: 1904995 - DNA, 15 bp, Homo sapiens
cctctgtttcccttc

SEQ ID NO: 1904996 - DNA, 15 bp, Homo sapiens
ctctgtttcccttcc

SEQ ID NO: 1904997 - DNA, 15 bp, Homo sapiens
tctgtttcccttcct

SEQ ID NO: 1904998 - DNA, 15 bp, Homo sapiens
ctgtttcccttcctc

SEQ ID NO: 1904999 - DNA, 15 bp, Homo sapiens
tgtttcccttcctct

SEQ ID NO: 1905000 - DNA, 15 bp, Homo sapiens
gtttcccttcctctt

SEQ ID NO: 1905001 - DNA, 15 bp, Homo sapiens
tttcccttcctcttg

SEQ ID NO: 1905002 - DNA, 15 bp, Homo sapiens
ttcccttcctcttgt

SEQ ID NO: 1905003 - DNA, 15 bp, Homo sapiens
tcccttcctcttgtg

SEQ ID NO: 1905004 - DNA, 15 bp, Homo sapiens
cccttcctcttgtga

SEQ ID NO: 1905005 - DNA, 15 bp, Homo sapiens
ccttcctcttgtgat

SEQ ID NO: 1905006 - DNA, 15 bp, Homo sapiens
cttcctcttgtgatg

SEQ ID NO: 1905007 - DNA, 15 bp, Homo sapiens
ttcctcttgtgatgg

SEQ ID NO: 1905008 - DNA, 15 bp, Homo sapiens
tcctcttgtgatggc

SEQ ID NO: 1905009 - DNA, 15 bp, Homo sapiens
cctcttgtgatggca

SEQ ID NO: 1905010 - DNA, 15 bp, Homo sapiens
ctcttgtgatggcag

SEQ ID NO: 1905011 - DNA, 15 bp, Homo sapiens
tcttgtgatggcagc

SEQ ID NO: 1905012 - DNA, 15 bp, Homo sapiens
cttgtgatggcagca

SEQ ID NO: 1905013 - DNA, 15 bp, Homo sapiens
ttgtgatggcagcag

SEQ ID NO: 1905014 - DNA, 15 bp, Homo sapiens
tgtgatggcagcagc

SEQ ID NO: 1905015 - DNA, 15 bp, Homo sapiens
gtgatggcagcagcg

SEQ ID NO: 1905016 - DNA, 15 bp, Homo sapiens
tgatggcagcagcgt

SEQ ID NO: 1905017 - DNA, 15 bp, Homo sapiens
gatggcagcagcgtc

SEQ ID NO: 1905018 - DNA, 15 bp, Homo sapiens
atggcagcagcgtct

SEQ ID NO: 1905019 - DNA, 15 bp, Homo sapiens
tggcagcagcgtctc

SEQ ID NO: 1905020 - DNA, 15 bp, Homo sapiens
ggcagcagcgtctca

SEQ ID NO: 1905021 - DNA, 15 bp, Homo sapiens
gcagcagcgtctcaa

SEQ ID NO: 1905022 - DNA, 15 bp, Homo sapiens
cagcagcgtctcaag

SEQ ID NO: 1905023 - DNA, 15 bp, Homo sapiens
agcagcgtctcaagc

SEQ ID NO: 1905024 - DNA, 15 bp, Homo sapiens
gcagcgtctcaagcc

SEQ ID NO: 1905025 - DNA, 15 bp, Homo sapiens
cagcgtctcaagcca

SEQ ID NO: 1905026 - DNA, 15 bp, Homo sapiens
agcgtctcaagccaa

SEQ ID NO: 1905027 - DNA, 15 bp, Homo sapiens
gcgtctcaagccaaa

SEQ ID NO: 1905028 - DNA, 15 bp, Homo sapiens
cgtctcaagccaaac

SEQ ID NO: 1905029 - DNA, 15 bp, Homo sapiens
gtctcaagccaaaca

SEQ ID NO: 1905030 - DNA, 15 bp, Homo sapiens
tctcaagccaaacaa

SEQ ID NO: 1905031 - DNA, 15 bp, Homo sapiens
ctcaagccaaacaag

SEQ ID NO: 1905032 - DNA, 15 bp, Homo sapiens
tcaagccaaacaaga

SEQ ID NO: 1905033 - DNA, 15 bp, Homo sapiens
caagccaaacaagaa

SEQ ID NO: 1905034 - DNA, 15 bp, Homo sapiens
aagccaaacaagaag

SEQ ID NO: 1905035 - DNA, 15 bp, Homo sapiens
agccaaacaagaagg

SEQ ID NO: 1905036 - DNA, 15 bp, Homo sapiens
gccaaacaagaaggg

SEQ ID NO: 1905037 - DNA, 15 bp, Homo sapiens
ccaaacaagaagggt

SEQ ID NO: 1905038 - DNA, 15 bp, Homo sapiens
caaacaagaagggta

SEQ ID NO: 1905039 - DNA, 15 bp, Homo sapiens
aaacaagaagggtag

SEQ ID NO: 1905040 - DNA, 15 bp, Homo sapiens
aacaagaagggtagt

SEQ ID NO: 1905041 - DNA, 15 bp, Homo sapiens
acaagaagggtagtt

SEQ ID NO: 1905042 - DNA, 15 bp, Homo sapiens
caagaagggtagtta

SEQ ID NO: 1905043 - DNA, 15 bp, Homo sapiens
aagaagggtagttag

SEQ ID NO: 1905044 - DNA, 15 bp, Homo sapiens
agaagggtagttagg

SEQ ID NO: 1905045 - DNA, 15 bp, Homo sapiens
gaagggtagttaggg

SEQ ID NO: 1905046 - DNA, 15 bp, Homo sapiens
aagggtagttagggt

SEQ ID NO: 1905047 - DNA, 15 bp, Homo sapiens
agggtagttagggtg

SEQ ID NO: 1905048 - DNA, 15 bp, Homo sapiens
gggtagttagggtgg

SEQ ID NO: 1905049 - DNA, 15 bp, Homo sapiens
ggtagttagggtggg

SEQ ID NO: 1905050 - DNA, 15 bp, Homo sapiens
gtagttagggtggga

SEQ ID NO: 1905051 - DNA, 15 bp, Homo sapiens
tagttagggtgggat

SEQ ID NO: 1905052 - DNA, 15 bp, Homo sapiens
agttagggtgggatg

SEQ ID NO: 1905053 - DNA, 15 bp, Homo sapiens
gttagggtgggatgg

SEQ ID NO: 1905054 - DNA, 15 bp, Homo sapiens
ttagggtgggatgga

SEQ ID NO: 1905055 - DNA, 15 bp, Homo sapiens
tagggtgggatggaa

SEQ ID NO: 1905056 - DNA, 15 bp, Homo sapiens
agggtgggatggaag

SEQ ID NO: 1905057 - DNA, 15 bp, Homo sapiens
gggtgggatggaagc

SEQ ID NO: 1905058 - DNA, 15 bp, Homo sapiens
ggtgggatggaagct

SEQ ID NO: 1905059 - DNA, 15 bp, Homo sapiens
gtgggatggaagctg

SEQ ID NO: 1905060 - DNA, 15 bp, Homo sapiens
tgggatggaagctgg

SEQ ID NO: 1905061 - DNA, 15 bp, Homo sapiens
gggatggaagctggg

SEQ ID NO: 1905062 - DNA, 15 bp, Homo sapiens
ggatggaagctgggt

SEQ ID NO: 1905063 - DNA, 15 bp, Homo sapiens
gatggaagctgggta

SEQ ID NO: 1905064 - DNA, 15 bp, Homo sapiens
atggaagctgggtag

SEQ ID NO: 1905065 - DNA, 15 bp, Homo sapiens
tggaagctgggtaga

SEQ ID NO: 1905066 - DNA, 15 bp, Homo sapiens
ggaagctgggtagag

SEQ ID NO: 1905067 - DNA, 15 bp, Homo sapiens
gaagctgggtagagg

SEQ ID NO: 1905068 - DNA, 15 bp, Homo sapiens
aagctgggtagaggt

SEQ ID NO: 1905069 - DNA, 15 bp, Homo sapiens
agctgggtagaggta

SEQ ID NO: 1905070 - DNA, 15 bp, Homo sapiens
gctgggtagaggtat

SEQ ID NO: 1905071 - DNA, 15 bp, Homo sapiens
ctgggtagaggtatt

SEQ ID NO: 1905072 - DNA, 15 bp, Homo sapiens
tgggtagaggtattc

SEQ ID NO: 1905073 - DNA, 15 bp, Homo sapiens
gggtagaggtattcc

SEQ ID NO: 1905074 - DNA, 15 bp, Homo sapiens
ggtagaggtattcct

SEQ ID NO: 1905075 - DNA, 15 bp, Homo sapiens
gtagaggtattcctc

SEQ ID NO: 1905076 - DNA, 15 bp, Homo sapiens
tagaggtattcctct

SEQ ID NO: 1905077 - DNA, 15 bp, Homo sapiens
agaggtattcctctc

SEQ ID NO: 1905078 - DNA, 15 bp, Homo sapiens
gaggtattcctctcc

SEQ ID NO: 1905079 - DNA, 15 bp, Homo sapiens
aggtattcctctccc

SEQ ID NO: 1905080 - DNA, 15 bp, Homo sapiens
ggtattcctctcccc

SEQ ID NO: 1905081 - DNA, 15 bp, Homo sapiens
gtattcctctcccca

SEQ ID NO: 1905082 - DNA, 15 bp, Homo sapiens
tattcctctccccat

SEQ ID NO: 1905083 - DNA, 15 bp, Homo sapiens
attcctctccccata

SEQ ID NO: 1905084 - DNA, 15 bp, Homo sapiens
ttcctctccccatag

SEQ ID NO: 1905085 - DNA, 15 bp, Homo sapiens
tcctctccccatagt

SEQ ID NO: 1905086 - DNA, 15 bp, Homo sapiens
cctctccccatagtt

SEQ ID NO: 1905087 - DNA, 15 bp, Homo sapiens
ctctccccatagttc

SEQ ID NO: 1905088 - DNA, 15 bp, Homo sapiens
tctccccatagttct

SEQ ID NO: 1905089 - DNA, 15 bp, Homo sapiens
ctccccatagttctg

SEQ ID NO: 1905090 - DNA, 15 bp, Homo sapiens
tccccatagttctgt

SEQ ID NO: 1905091 - DNA, 15 bp, Homo sapiens
ccccatagttctgtg

SEQ ID NO: 1905092 - DNA, 15 bp, Homo sapiens
cccatagttctgtgt

SEQ ID NO: 1905093 - DNA, 15 bp, Homo sapiens
ccatagttctgtgtt

SEQ ID NO: 1905094 - DNA, 15 bp, Homo sapiens
catagttctgtgttc

SEQ ID NO: 1905095 - DNA, 15 bp, Homo sapiens
atagttctgtgttca

SEQ ID NO: 1905096 - DNA, 15 bp, Homo sapiens
tagttctgtgttcac

SEQ ID NO: 1905097 - DNA, 15 bp, Homo sapiens
agttctgtgttcaca

SEQ ID NO: 1905098 - DNA, 15 bp, Homo sapiens
gttctgtgttcacat

SEQ ID NO: 1905099 - DNA, 15 bp, Homo sapiens
ttctgtgttcacatg

SEQ ID NO: 1905100 - DNA, 15 bp, Homo sapiens
tctgtgttcacatgt

SEQ ID NO: 1905101 - DNA, 15 bp, Homo sapiens
ctgtgttcacatgtg

SEQ ID NO: 1905102 - DNA, 15 bp, Homo sapiens
tgtgttcacatgtgc

SEQ ID NO: 1905103 - DNA, 15 bp, Homo sapiens
gtgttcacatgtgca

SEQ ID NO: 1905104 - DNA, 15 bp, Homo sapiens
tgttcacatgtgcat

SEQ ID NO: 1905105 - DNA, 15 bp, Homo sapiens
gttcacatgtgcatt

SEQ ID NO: 1905106 - DNA, 15 bp, Homo sapiens
ttcacatgtgcattg

SEQ ID NO: 1905107 - DNA, 15 bp, Homo sapiens
tcacatgtgcattga

SEQ ID NO: 1905108 - DNA, 15 bp, Homo sapiens
cacatgtgcattgac

SEQ ID NO: 1905109 - DNA, 15 bp, Homo sapiens
acatgtgcattgacc

SEQ ID NO: 1905110 - DNA, 15 bp, Homo sapiens
catgtgcattgacct

SEQ ID NO: 1905111 - DNA, 15 bp, Homo sapiens
atgtgcattgacctc

SEQ ID NO: 1905112 - DNA, 15 bp, Homo sapiens
tgtgcattgacctcc

SEQ ID NO: 1905113 - DNA, 15 bp, Homo sapiens
gtgcattgacctcct

SEQ ID NO: 1905114 - DNA, 15 bp, Homo sapiens
tgcattgacctcctt

SEQ ID NO: 1905115 - DNA, 15 bp, Homo sapiens
gcattgacctccttt

SEQ ID NO: 1905116 - DNA, 15 bp, Homo sapiens
cattgacctcctttt

SEQ ID NO: 1905117 - DNA, 15 bp, Homo sapiens
attgacctccttttt

SEQ ID NO: 1905118 - DNA, 15 bp, Homo sapiens
ttgacctcctttttg

SEQ ID NO: 1905119 - DNA, 15 bp, Homo sapiens
tgacctcctttttgg

SEQ ID NO: 1905120 - DNA, 15 bp, Homo sapiens
gacctcctttttggc

SEQ ID NO: 1905121 - DNA, 15 bp, Homo sapiens
acctcctttttggca

SEQ ID NO: 1905122 - DNA, 15 bp, Homo sapiens
cctcctttttggcag

SEQ ID NO: 1905123 - DNA, 15 bp, Homo sapiens
ctcctttttggcagc

SEQ ID NO: 1905124 - DNA, 15 bp, Homo sapiens
tcctttttggcagca

SEQ ID NO: 1905125 - DNA, 15 bp, Homo sapiens
cctttttggcagcaa

SEQ ID NO: 1905126 - DNA, 15 bp, Homo sapiens
ctttttggcagcaag

SEQ ID NO: 1905127 - DNA, 15 bp, Homo sapiens
tttttggcagcaagg

SEQ ID NO: 1905128 - DNA, 15 bp, Homo sapiens
ttttggcagcaaggg

SEQ ID NO: 1905129 - DNA, 15 bp, Homo sapiens
tttggcagcaagggg

SEQ ID NO: 1905130 - DNA, 15 bp, Homo sapiens
ttggcagcaaggggg

SEQ ID NO: 1905131 - DNA, 15 bp, Homo sapiens
tggcagcaagggggc

SEQ ID NO: 1905132 - DNA, 15 bp, Homo sapiens
ggcagcaagggggcc

SEQ ID NO: 1905133 - DNA, 15 bp, Homo sapiens
gcagcaagggggcca

SEQ ID NO: 1905134 - DNA, 15 bp, Homo sapiens
cagcaagggggccag

SEQ ID NO: 1905135 - DNA, 15 bp, Homo sapiens
agcaagggggccagg

SEQ ID NO: 1905136 - DNA, 15 bp, Homo sapiens
gcaagggggccaggc

SEQ ID NO: 1905137 - DNA, 15 bp, Homo sapiens
caagggggccaggcc

SEQ ID NO: 1905138 - DNA, 15 bp, Homo sapiens
aagggggccaggcca

SEQ ID NO: 1905139 - DNA, 15 bp, Homo sapiens
agggggccaggccaa

SEQ ID NO: 1905140 - DNA, 15 bp, Homo sapiens
gggggccaggccaac

SEQ ID NO: 1905141 - DNA, 15 bp, Homo sapiens
ggggccaggccaacc

SEQ ID NO: 1905142 - DNA, 15 bp, Homo sapiens
gggccaggccaacca

SEQ ID NO: 1905143 - DNA, 15 bp, Homo sapiens
ggccaggccaaccac

SEQ ID NO: 1905144 - DNA, 15 bp, Homo sapiens
gccaggccaaccacc

SEQ ID NO: 1905145 - DNA, 15 bp, Homo sapiens
ccaggccaaccaccc

SEQ ID NO: 1905146 - DNA, 15 bp, Homo sapiens
caggccaaccacccc

SEQ ID NO: 1905147 - DNA, 15 bp, Homo sapiens
aggccaaccacccca

SEQ ID NO: 1905148 - DNA, 15 bp, Homo sapiens
ggccaaccaccccac

SEQ ID NO: 1905149 - DNA, 15 bp, Homo sapiens
gccaaccaccccaca

SEQ ID NO: 1905150 - DNA, 15 bp, Homo sapiens
ccaaccaccccacag

SEQ ID NO: 1905151 - DNA, 15 bp, Homo sapiens
caaccaccccacagc

SEQ ID NO: 1905152 - DNA, 15 bp, Homo sapiens
aaccaccccacagca

SEQ ID NO: 1905153 - DNA, 15 bp, Homo sapiens
accaccccacagcag

SEQ ID NO: 1905154 - DNA, 15 bp, Homo sapiens
ccaccccacagcagc

SEQ ID NO: 1905155 - DNA, 15 bp, Homo sapiens
caccccacagcagcc

SEQ ID NO: 1905156 - DNA, 15 bp, Homo sapiens
accccacagcagccg

SEQ ID NO: 1905157 - DNA, 15 bp, Homo sapiens
ccccacagcagccgt

SEQ ID NO: 1905158 - DNA, 15 bp, Homo sapiens
cccacagcagccgtg

SEQ ID NO: 1905159 - DNA, 15 bp, Homo sapiens
ccacagcagccgtgg

SEQ ID NO: 1905160 - DNA, 15 bp, Homo sapiens
cacagcagccgtggt

SEQ ID NO: 1905161 - DNA, 15 bp, Homo sapiens
acagcagccgtggtg

SEQ ID NO: 1905162 - DNA, 15 bp, Homo sapiens
cagcagccgtggtga

SEQ ID NO: 1905163 - DNA, 15 bp, Homo sapiens
agcagccgtggtgac

SEQ ID NO: 1905164 - DNA, 15 bp, Homo sapiens
gcagccgtggtgacg

SEQ ID NO: 1905165 - DNA, 15 bp, Homo sapiens
cagccgtggtgacgg

SEQ ID NO: 1905166 - DNA, 15 bp, Homo sapiens
agccgtggtgacgga

SEQ ID NO: 1905167 - DNA, 15 bp, Homo sapiens
gccgtggtgacggag

SEQ ID NO: 1905168 - DNA, 15 bp, Homo sapiens
ccgtggtgacggaga

SEQ ID NO: 1905169 - DNA, 15 bp, Homo sapiens
cgtggtgacggagaa

SEQ ID NO: 1905170 - DNA, 15 bp, Homo sapiens
gtggtgacggagaag

SEQ ID NO: 1905171 - DNA, 15 bp, Homo sapiens
tggtgacggagaagc

SEQ ID NO: 1905172 - DNA, 15 bp, Homo sapiens
ggtgacggagaagca

SEQ ID NO: 1905173 - DNA, 15 bp, Homo sapiens
gtgacggagaagcag

SEQ ID NO: 1905174 - DNA, 15 bp, Homo sapiens
tgacggagaagcagc

SEQ ID NO: 1905175 - DNA, 15 bp, Homo sapiens
gacggagaagcagca

SEQ ID NO: 1905176 - DNA, 15 bp, Homo sapiens
acggagaagcagcag

SEQ ID NO: 1905177 - DNA, 15 bp, Homo sapiens
cggagaagcagcaga

SEQ ID NO: 1905178 - DNA, 15 bp, Homo sapiens
ggagaagcagcagat

SEQ ID NO: 1905179 - DNA, 15 bp, Homo sapiens
gagaagcagcagatg

SEQ ID NO: 1905180 - DNA, 15 bp, Homo sapiens
agaagcagcagatgc

SEQ ID NO: 1905181 - DNA, 15 bp, Homo sapiens
gaagcagcagatgct

SEQ ID NO: 1905182 - DNA, 15 bp, Homo sapiens
aagcagcagatgctg

SEQ ID NO: 1905183 - DNA, 15 bp, Homo sapiens
agcagcagatgctgg

SEQ ID NO: 1905184 - DNA, 15 bp, Homo sapiens
cagcagatgctggag

SEQ ID NO: 1905185 - DNA, 15 bp, Homo sapiens
agcagatgctggagc

SEQ ID NO: 1905186 - DNA, 15 bp, Homo sapiens
gcagatgctggagca

SEQ ID NO: 1905187 - DNA, 15 bp, Homo sapiens
cagatgctggagcag

SEQ ID NO: 1905188 - DNA, 15 bp, Homo sapiens
agatgctggagcagc

SEQ ID NO: 1905189 - DNA, 15 bp, Homo sapiens
gatgctggagcagca

SEQ ID NO: 1905190 - DNA, 15 bp, Homo sapiens
atgctggagcagcac

SEQ ID NO: 1905191 - DNA, 15 bp, Homo sapiens
tgctggagcagcacc

SEQ ID NO: 1905192 - DNA, 15 bp, Homo sapiens
gctggagcagcacct

SEQ ID NO: 1905193 - DNA, 15 bp, Homo sapiens
ctggagcagcacctt

SEQ ID NO: 1905194 - DNA, 15 bp, Homo sapiens
tggagcagcaccttc

SEQ ID NO: 1905195 - DNA, 15 bp, Homo sapiens
ggagcagcaccttca

SEQ ID NO: 1905196 - DNA, 15 bp, Homo sapiens
gagcagcaccttcag

SEQ ID NO: 1905197 - DNA, 15 bp, Homo sapiens
agcagcaccttcagg

SEQ ID NO: 1905198 - DNA, 15 bp, Homo sapiens
gcagcaccttcagga

SEQ ID NO: 1905199 - DNA, 15 bp, Homo sapiens
cagcaccttcaggat

SEQ ID NO: 1905200 - DNA, 15 bp, Homo sapiens
agcaccttcaggatg

SEQ ID NO: 1905201 - DNA, 15 bp, Homo sapiens
gcaccttcaggatgt

SEQ ID NO: 1905202 - DNA, 15 bp, Homo sapiens
caccttcaggatgtc

SEQ ID NO: 1905203 - DNA, 15 bp, Homo sapiens
accttcaggatgtcc

SEQ ID NO: 1905204 - DNA, 15 bp, Homo sapiens
ccttcaggatgtccg

SEQ ID NO: 1905205 - DNA, 15 bp, Homo sapiens
cttcaggatgtccgg

SEQ ID NO: 1905206 - DNA, 15 bp, Homo sapiens
ttcaggatgtccgga

SEQ ID NO: 1905207 - DNA, 15 bp, Homo sapiens
tcaggatgtccggaa

SEQ ID NO: 1905208 - DNA, 15 bp, Homo sapiens
caggatgtccggaag

SEQ ID NO: 1905209 - DNA, 15 bp, Homo sapiens
aggatgtccggaaga

SEQ ID NO: 1905210 - DNA, 15 bp, Homo sapiens
ggatgtccggaagag

SEQ ID NO: 1905211 - DNA, 15 bp, Homo sapiens
gatgtccggaagaga

SEQ ID NO: 1905212 - DNA, 15 bp, Homo sapiens
atgtccggaagagag

SEQ ID NO: 1905213 - DNA, 15 bp, Homo sapiens
tgtccggaagagagt

SEQ ID NO: 1905214 - DNA, 15 bp, Homo sapiens
gtccggaagagagtg

SEQ ID NO: 1905215 - DNA, 15 bp, Homo sapiens
tccggaagagagtgc

SEQ ID NO: 1905216 - DNA, 15 bp, Homo sapiens
ccggaagagagtgca

SEQ ID NO: 1905217 - DNA, 15 bp, Homo sapiens
cggaagagagtgcag

SEQ ID NO: 1905218 - DNA, 15 bp, Homo sapiens
ggaagagagtgcagg

SEQ ID NO: 1905219 - DNA, 15 bp, Homo sapiens
gaagagagtgcaggt

SEQ ID NO: 1905220 - DNA, 15 bp, Homo sapiens
aagagagtgcaggtg

SEQ ID NO: 1905221 - DNA, 15 bp, Homo sapiens
agagagtgcaggtga

SEQ ID NO: 1905222 - DNA, 15 bp, Homo sapiens
gagagtgcaggtgat

SEQ ID NO: 1905223 - DNA, 15 bp, Homo sapiens
agagtgcaggtgatg

SEQ ID NO: 1905224 - DNA, 15 bp, Homo sapiens
gagtgcaggtgatgc

SEQ ID NO: 1905225 - DNA, 15 bp, Homo sapiens
agtgcaggtgatgca

SEQ ID NO: 1905226 - DNA, 15 bp, Homo sapiens
gtgcaggtgatgcaa

SEQ ID NO: 1905227 - DNA, 15 bp, Homo sapiens
tgcaggtgatgcaag

SEQ ID NO: 1905228 - DNA, 15 bp, Homo sapiens
gcaggtgatgcaagt

SEQ ID NO: 1905229 - DNA, 15 bp, Homo sapiens
caggtgatgcaagtt

SEQ ID NO: 1905230 - DNA, 15 bp, Homo sapiens
aggtgatgcaagtta

SEQ ID NO: 1905231 - DNA, 15 bp, Homo sapiens
ggtgatgcaagttac

SEQ ID NO: 1905232 - DNA, 15 bp, Homo sapiens
gtgatgcaagttaca

SEQ ID NO: 1905233 - DNA, 15 bp, Homo sapiens
tgatgcaagttacaa

SEQ ID NO: 1905234 - DNA, 15 bp, Homo sapiens
gatgcaagttacaag

SEQ ID NO: 1905235 - DNA, 15 bp, Homo sapiens
atgcaagttacaagc

SEQ ID NO: 1905236 - DNA, 15 bp, Homo sapiens
tgcaagttacaagcc

SEQ ID NO: 1905237 - DNA, 15 bp, Homo sapiens
gcaagttacaagcct

SEQ ID NO: 1905238 - DNA, 15 bp, Homo sapiens
caagttacaagcctc

SEQ ID NO: 1905239 - DNA, 15 bp, Homo sapiens
aagttacaagcctcg

SEQ ID NO: 1905240 - DNA, 15 bp, Homo sapiens
agttacaagcctcgg

SEQ ID NO: 1905241 - DNA, 15 bp, Homo sapiens
gttacaagcctcggg

SEQ ID NO: 1905242 - DNA, 15 bp, Homo sapiens
ttacaagcctcgggc

SEQ ID NO: 1905243 - DNA, 15 bp, Homo sapiens
tacaagcctcgggca

SEQ ID NO: 1905244 - DNA, 15 bp, Homo sapiens
acaagcctcgggcag

SEQ ID NO: 1905245 - DNA, 15 bp, Homo sapiens
caagcctcgggcagg

SEQ ID NO: 1905246 - DNA, 15 bp, Homo sapiens
aagcctcgggcaggg

SEQ ID NO: 1905247 - DNA, 15 bp, Homo sapiens
agcctcgggcaggga

SEQ ID NO: 1905248 - DNA, 15 bp, Homo sapiens
gcctcgggcagggag

SEQ ID NO: 1905249 - DNA, 15 bp, Homo sapiens
cctcgggcagggagc

SEQ ID NO: 1905250 - DNA, 15 bp, Homo sapiens
ctcgggcagggagct

SEQ ID NO: 1905251 - DNA, 15 bp, Homo sapiens
tcgggcagggagctt

SEQ ID NO: 1905252 - DNA, 15 bp, Homo sapiens
cgggcagggagcttt

SEQ ID NO: 1905253 - DNA, 15 bp, Homo sapiens
gggcagggagctttc

SEQ ID NO: 1905254 - DNA, 15 bp, Homo sapiens
ggcagggagctttca

SEQ ID NO: 1905255 - DNA, 15 bp, Homo sapiens
gcagggagctttcat

SEQ ID NO: 1905256 - DNA, 15 bp, Homo sapiens
cagggagctttcatt

SEQ ID NO: 1905257 - DNA, 15 bp, Homo sapiens
agggagctttcatta

SEQ ID NO: 1905258 - DNA, 15 bp, Homo sapiens
gggagctttcattaa

SEQ ID NO: 1905259 - DNA, 15 bp, Homo sapiens
ggagctttcattaat

SEQ ID NO: 1905260 - DNA, 15 bp, Homo sapiens
gagctttcattaatt

SEQ ID NO: 1905261 - DNA, 15 bp, Homo sapiens
agctttcattaattt

SEQ ID NO: 1905262 - DNA, 15 bp, Homo sapiens
gctttcattaatttt

SEQ ID NO: 1905263 - DNA, 15 bp, Homo sapiens
ctttcattaattttt

SEQ ID NO: 1905264 - DNA, 15 bp, Homo sapiens
tttcattaatttttt

SEQ ID NO: 1905265 - DNA, 15 bp, Homo sapiens
agggtcttgctctgc

SEQ ID NO: 1905266 - DNA, 15 bp, Homo sapiens
gggtcttgctctgcc

SEQ ID NO: 1905267 - DNA, 15 bp, Homo sapiens
ggtcttgctctgcca

SEQ ID NO: 1905268 - DNA, 15 bp, Homo sapiens
gtcttgctctgccac

SEQ ID NO: 1905269 - DNA, 15 bp, Homo sapiens
tcttgctctgccact

SEQ ID NO: 1905270 - DNA, 15 bp, Homo sapiens
cttgctctgccactc

SEQ ID NO: 1905271 - DNA, 15 bp, Homo sapiens
ttgctctgccactca

SEQ ID NO: 1905272 - DNA, 15 bp, Homo sapiens
tgctctgccactcag

SEQ ID NO: 1905273 - DNA, 15 bp, Homo sapiens
gctctgccactcagg

SEQ ID NO: 1905274 - DNA, 15 bp, Homo sapiens
ctctgccactcaggc

SEQ ID NO: 1905275 - DNA, 15 bp, Homo sapiens
tctgccactcaggct

SEQ ID NO: 1905276 - DNA, 15 bp, Homo sapiens
ctgccactcaggctg

SEQ ID NO: 1905277 - DNA, 15 bp, Homo sapiens
tgccactcaggctgg

SEQ ID NO: 1905278 - DNA, 15 bp, Homo sapiens
gccactcaggctggg

SEQ ID NO: 1905279 - DNA, 15 bp, Homo sapiens
ccactcaggctgggc

SEQ ID NO: 1905280 - DNA, 15 bp, Homo sapiens
cactcaggctgggct

SEQ ID NO: 1905281 - DNA, 15 bp, Homo sapiens
actcaggctgggctg

SEQ ID NO: 1905282 - DNA, 15 bp, Homo sapiens
ctcaggctgggctgc

SEQ ID NO: 1905283 - DNA, 15 bp, Homo sapiens
tcaggctgggctgca

SEQ ID NO: 1905284 - DNA, 15 bp, Homo sapiens
caggctgggctgcag

SEQ ID NO: 1905285 - DNA, 15 bp, Homo sapiens
aggctgggctgcagt

SEQ ID NO: 1905286 - DNA, 15 bp, Homo sapiens
ggctgggctgcagtg

SEQ ID NO: 1905287 - DNA, 15 bp, Homo sapiens
gctgggctgcagtgg

SEQ ID NO: 1905288 - DNA, 15 bp, Homo sapiens
ctgggctgcagtggc

SEQ ID NO: 1905289 - DNA, 15 bp, Homo sapiens
tgggctgcagtggca

SEQ ID NO: 1905290 - DNA, 15 bp, Homo sapiens
gggctgcagtggcat

SEQ ID NO: 1905291 - DNA, 15 bp, Homo sapiens
ggctgcagtggcatg

SEQ ID NO: 1905292 - DNA, 15 bp, Homo sapiens
gctgcagtggcatga

SEQ ID NO: 1905293 - DNA, 15 bp, Homo sapiens
ctgcagtggcatgat

SEQ ID NO: 1905294 - DNA, 15 bp, Homo sapiens
agtggcatgatcaca

SEQ ID NO: 1905295 - DNA, 15 bp, Homo sapiens
gtggcatgatcacag

SEQ ID NO: 1905296 - DNA, 15 bp, Homo sapiens
tggcatgatcacagc

SEQ ID NO: 1905297 - DNA, 15 bp, Homo sapiens
ggcatgatcacagct

SEQ ID NO: 1905298 - DNA, 15 bp, Homo sapiens
gcatgatcacagctc

SEQ ID NO: 1905299 - DNA, 15 bp, Homo sapiens
actgcagcctcgacc

SEQ ID NO: 1905300 - DNA, 15 bp, Homo sapiens
ctgcagcctcgacct

SEQ ID NO: 1905301 - DNA, 15 bp, Homo sapiens
tgcagcctcgacctc

SEQ ID NO: 1905302 - DNA, 15 bp, Homo sapiens
gcagcctcgacctct

SEQ ID NO: 1905303 - DNA, 15 bp, Homo sapiens
cagcctcgacctctc

SEQ ID NO: 1905304 - DNA, 15 bp, Homo sapiens
agcctcgacctctca

SEQ ID NO: 1905305 - DNA, 15 bp, Homo sapiens
gcctcgacctctcag

SEQ ID NO: 1905306 - DNA, 15 bp, Homo sapiens
cctcgacctctcagg

SEQ ID NO: 1905307 - DNA, 15 bp, Homo sapiens
ctcgacctctcaggc

SEQ ID NO: 1905308 - DNA, 15 bp, Homo sapiens
tcgacctctcaggcc

SEQ ID NO: 1905309 - DNA, 15 bp, Homo sapiens
cgacctctcaggccc

SEQ ID NO: 1905310 - DNA, 15 bp, Homo sapiens
gacctctcaggccca

SEQ ID NO: 1905311 - DNA, 15 bp, Homo sapiens
acctctcaggcccaa

SEQ ID NO: 1905312 - DNA, 15 bp, Homo sapiens
cctctcaggcccaag

SEQ ID NO: 1905313 - DNA, 15 bp, Homo sapiens
ctctcaggcccaagc

SEQ ID NO: 1905314 - DNA, 15 bp, Homo sapiens
tctcaggcccaagcg

SEQ ID NO: 1905315 - DNA, 15 bp, Homo sapiens
ctcaggcccaagcga

SEQ ID NO: 1905316 - DNA, 15 bp, Homo sapiens
tcaggcccaagcgat

SEQ ID NO: 1905317 - DNA, 15 bp, Homo sapiens
caggcccaagcgatc

SEQ ID NO: 1905318 - DNA, 15 bp, Homo sapiens
aggcccaagcgatcc

SEQ ID NO: 1905319 - DNA, 15 bp, Homo sapiens
caagcgatcctccta

SEQ ID NO: 1905320 - DNA, 15 bp, Homo sapiens
aagcgatcctcctac

SEQ ID NO: 1905321 - DNA, 15 bp, Homo sapiens
agcgatcctcctacc

SEQ ID NO: 1905322 - DNA, 15 bp, Homo sapiens
gcgatcctcctacct

SEQ ID NO: 1905323 - DNA, 15 bp, Homo sapiens
cgatcctcctacctc

SEQ ID NO: 1905324 - DNA, 15 bp, Homo sapiens
atcctcctacctcat

SEQ ID NO: 1905325 - DNA, 15 bp, Homo sapiens
tcctcctacctcatc

SEQ ID NO: 1905326 - DNA, 15 bp, Homo sapiens
cctcctacctcatcc

SEQ ID NO: 1905327 - DNA, 15 bp, Homo sapiens
ctcctacctcatcct

SEQ ID NO: 1905328 - DNA, 15 bp, Homo sapiens
tcctacctcatcctc

SEQ ID NO: 1905329 - DNA, 15 bp, Homo sapiens
cctacctcatcctcc

SEQ ID NO: 1905330 - DNA, 15 bp, Homo sapiens
ctacctcatcctccc

SEQ ID NO: 1905331 - DNA, 15 bp, Homo sapiens
tacctcatcctccca

SEQ ID NO: 1905332 - DNA, 15 bp, Homo sapiens
acctcatcctcccaa

SEQ ID NO: 1905333 - DNA, 15 bp, Homo sapiens
cctcatcctcccaag

SEQ ID NO: 1905334 - DNA, 15 bp, Homo sapiens
ctcatcctcccaagt

SEQ ID NO: 1905335 - DNA, 15 bp, Homo sapiens
tcatcctcccaagta

SEQ ID NO: 1905336 - DNA, 15 bp, Homo sapiens
catcctcccaagtag

SEQ ID NO: 1905337 - DNA, 15 bp, Homo sapiens
atcctcccaagtagc

SEQ ID NO: 1905338 - DNA, 15 bp, Homo sapiens
tcctcccaagtagcc

SEQ ID NO: 1905339 - DNA, 15 bp, Homo sapiens
cctcccaagtagccg

SEQ ID NO: 1905340 - DNA, 15 bp, Homo sapiens
ctcccaagtagccgg

SEQ ID NO: 1905341 - DNA, 15 bp, Homo sapiens
tcccaagtagccggg

SEQ ID NO: 1905342 - DNA, 15 bp, Homo sapiens
cccaagtagccggga

SEQ ID NO: 1905343 - DNA, 15 bp, Homo sapiens
ccaagtagccgggac

SEQ ID NO: 1905344 - DNA, 15 bp, Homo sapiens
caagtagccgggacc

SEQ ID NO: 1905345 - DNA, 15 bp, Homo sapiens
aagtagccgggacca

SEQ ID NO: 1905346 - DNA, 15 bp, Homo sapiens
agtagccgggaccac

SEQ ID NO: 1905347 - DNA, 15 bp, Homo sapiens
gtagccgggaccaca

SEQ ID NO: 1905348 - DNA, 15 bp, Homo sapiens
tagccgggaccacag

SEQ ID NO: 1905349 - DNA, 15 bp, Homo sapiens
agccgggaccacagg

SEQ ID NO: 1905350 - DNA, 15 bp, Homo sapiens
gccgggaccacaggc

SEQ ID NO: 1905351 - DNA, 15 bp, Homo sapiens
ccgggaccacaggca

SEQ ID NO: 1905352 - DNA, 15 bp, Homo sapiens
cgggaccacaggcat

SEQ ID NO: 1905353 - DNA, 15 bp, Homo sapiens
ggaccacaggcatgc

SEQ ID NO: 1905354 - DNA, 15 bp, Homo sapiens
gaccacaggcatgca

SEQ ID NO: 1905355 - DNA, 15 bp, Homo sapiens
accacaggcatgcac

SEQ ID NO: 1905356 - DNA, 15 bp, Homo sapiens
ccacaggcatgcacc

SEQ ID NO: 1905357 - DNA, 15 bp, Homo sapiens
cacaggcatgcacca

SEQ ID NO: 1905358 - DNA, 15 bp, Homo sapiens
gcatgcaccaccacg

SEQ ID NO: 1905359 - DNA, 15 bp, Homo sapiens
catgcaccaccacgc

SEQ ID NO: 1905360 - DNA, 15 bp, Homo sapiens
atgcaccaccacgcc

SEQ ID NO: 1905361 - DNA, 15 bp, Homo sapiens
gcaccaccacgccca

SEQ ID NO: 1905362 - DNA, 15 bp, Homo sapiens
accaccacgcccagc

SEQ ID NO: 1905363 - DNA, 15 bp, Homo sapiens
acgcccagctaatta

SEQ ID NO: 1905364 - DNA, 15 bp, Homo sapiens
cgcccagctaattaa

SEQ ID NO: 1905365 - DNA, 15 bp, Homo sapiens
agctaattaaaaaaa

SEQ ID NO: 1905366 - DNA, 15 bp, Homo sapiens
taattaaaaaaaaaa

SEQ ID NO: 1905367 - DNA, 15 bp, Homo sapiens
aaaaaaaaaaatttg

SEQ ID NO: 1905368 - DNA, 15 bp, Homo sapiens
aaaaaaaaaatttgt

SEQ ID NO: 1905369 - DNA, 15 bp, Homo sapiens
aaaaaaaaatttgta

SEQ ID NO: 1905370 - DNA, 15 bp, Homo sapiens
aaaaaaaatttgtag

SEQ ID NO: 1905371 - DNA, 15 bp, Homo sapiens
aaaaaaatttgtaga

SEQ ID NO: 1905372 - DNA, 15 bp, Homo sapiens
aaaaaatttgtagag

SEQ ID NO: 1905373 - DNA, 15 bp, Homo sapiens
aaaaatttgtagaga

SEQ ID NO: 1905374 - DNA, 15 bp, Homo sapiens
aaaatttgtagagat

SEQ ID NO: 1905375 - DNA, 15 bp, Homo sapiens
aaatttgtagagatg

SEQ ID NO: 1905376 - DNA, 15 bp, Homo sapiens
aatttgtagagatgg

SEQ ID NO: 1905377 - DNA, 15 bp, Homo sapiens
atttgtagagatggg

SEQ ID NO: 1905378 - DNA, 15 bp, Homo sapiens
ttgtagagatggggg

SEQ ID NO: 1905379 - DNA, 15 bp, Homo sapiens
tgtagagatgggggt

SEQ ID NO: 1905380 - DNA, 15 bp, Homo sapiens
gtagagatgggggtc

SEQ ID NO: 1905381 - DNA, 15 bp, Homo sapiens
tagagatgggggtct

SEQ ID NO: 1905382 - DNA, 15 bp, Homo sapiens
agagatgggggtctc

SEQ ID NO: 1905383 - DNA, 15 bp, Homo sapiens
gagatgggggtctcc

SEQ ID NO: 1905384 - DNA, 15 bp, Homo sapiens
agatgggggtctccc

SEQ ID NO: 1905385 - DNA, 15 bp, Homo sapiens
gatgggggtctccct

SEQ ID NO: 1905386 - DNA, 15 bp, Homo sapiens
atgggggtctccctg

SEQ ID NO: 1905387 - DNA, 15 bp, Homo sapiens
tgggggtctccctgt

SEQ ID NO: 1905388 - DNA, 15 bp, Homo sapiens
gggggtctccctgtg

SEQ ID NO: 1905389 - DNA, 15 bp, Homo sapiens
ggggtctccctgtgt

SEQ ID NO: 1905390 - DNA, 15 bp, Homo sapiens
gggtctccctgtgtt

SEQ ID NO: 1905391 - DNA, 15 bp, Homo sapiens
ggtctccctgtgttg

SEQ ID NO: 1905392 - DNA, 15 bp, Homo sapiens
gtctccctgtgttgt

SEQ ID NO: 1905393 - DNA, 15 bp, Homo sapiens
tctccctgtgttgtc

SEQ ID NO: 1905394 - DNA, 15 bp, Homo sapiens
ctccctgtgttgtcc

SEQ ID NO: 1905395 - DNA, 15 bp, Homo sapiens
tccctgtgttgtcca

SEQ ID NO: 1905396 - DNA, 15 bp, Homo sapiens
ccctgtgttgtccag

SEQ ID NO: 1905397 - DNA, 15 bp, Homo sapiens
cctgtgttgtccagg

SEQ ID NO: 1905398 - DNA, 15 bp, Homo sapiens
tgttgtccaggctga

SEQ ID NO: 1905399 - DNA, 15 bp, Homo sapiens
gttgtccaggctgat

SEQ ID NO: 1905400 - DNA, 15 bp, Homo sapiens
ttgtccaggctgatc

SEQ ID NO: 1905401 - DNA, 15 bp, Homo sapiens
tgtccaggctgatca

SEQ ID NO: 1905402 - DNA, 15 bp, Homo sapiens
gtccaggctgatcat

SEQ ID NO: 1905403 - DNA, 15 bp, Homo sapiens
tccaggctgatcatg

SEQ ID NO: 1905404 - DNA, 15 bp, Homo sapiens
ccaggctgatcatga

SEQ ID NO: 1905405 - DNA, 15 bp, Homo sapiens
caggctgatcatgaa

SEQ ID NO: 1905406 - DNA, 15 bp, Homo sapiens
aggctgatcatgaac

SEQ ID NO: 1905407 - DNA, 15 bp, Homo sapiens
ggctgatcatgaact

SEQ ID NO: 1905408 - DNA, 15 bp, Homo sapiens
gctgatcatgaactc

SEQ ID NO: 1905409 - DNA, 15 bp, Homo sapiens
ctgatcatgaactcc

SEQ ID NO: 1905410 - DNA, 15 bp, Homo sapiens
tgatcatgaactcct

SEQ ID NO: 1905411 - DNA, 15 bp, Homo sapiens
gatcatgaactcctg

SEQ ID NO: 1905412 - DNA, 15 bp, Homo sapiens
atcatgaactcctgg

SEQ ID NO: 1905413 - DNA, 15 bp, Homo sapiens
tcatgaactcctggg

SEQ ID NO: 1905414 - DNA, 15 bp, Homo sapiens
catgaactcctgggc

SEQ ID NO: 1905415 - DNA, 15 bp, Homo sapiens
atgaactcctgggct

SEQ ID NO: 1905416 - DNA, 15 bp, Homo sapiens
aagtgatcctcccaa

SEQ ID NO: 1905417 - DNA, 15 bp, Homo sapiens
agtgatcctcccaac

SEQ ID NO: 1905418 - DNA, 15 bp, Homo sapiens
gtgatcctcccaact

SEQ ID NO: 1905419 - DNA, 15 bp, Homo sapiens
tgatcctcccaactc

SEQ ID NO: 1905420 - DNA, 15 bp, Homo sapiens
gatcctcccaactca

SEQ ID NO: 1905421 - DNA, 15 bp, Homo sapiens
atcctcccaactcag

SEQ ID NO: 1905422 - DNA, 15 bp, Homo sapiens
tcctcccaactcagc

SEQ ID NO: 1905423 - DNA, 15 bp, Homo sapiens
cctcccaactcagcc

SEQ ID NO: 1905424 - DNA, 15 bp, Homo sapiens
ctcccaactcagcct

SEQ ID NO: 1905425 - DNA, 15 bp, Homo sapiens
tcccaactcagcctc

SEQ ID NO: 1905426 - DNA, 15 bp, Homo sapiens
cccaactcagcctct

SEQ ID NO: 1905427 - DNA, 15 bp, Homo sapiens
ccaactcagcctctc

SEQ ID NO: 1905428 - DNA, 15 bp, Homo sapiens
caactcagcctctca

SEQ ID NO: 1905429 - DNA, 15 bp, Homo sapiens
aactcagcctctcaa

SEQ ID NO: 1905430 - DNA, 15 bp, Homo sapiens
actcagcctctcaaa

SEQ ID NO: 1905431 - DNA, 15 bp, Homo sapiens
agcctctcaaagtgc

SEQ ID NO: 1905432 - DNA, 15 bp, Homo sapiens
tctcaaagtgctggc

SEQ ID NO: 1905433 - DNA, 15 bp, Homo sapiens
ctcaaagtgctggca

SEQ ID NO: 1905434 - DNA, 15 bp, Homo sapiens
tcaaagtgctggcat

SEQ ID NO: 1905435 - DNA, 15 bp, Homo sapiens
actgcacctggccaa

SEQ ID NO: 1905436 - DNA, 15 bp, Homo sapiens
ctgcacctggccaac

SEQ ID NO: 1905437 - DNA, 15 bp, Homo sapiens
tgcacctggccaaca

SEQ ID NO: 1905438 - DNA, 15 bp, Homo sapiens
gcacctggccaacag

SEQ ID NO: 1905439 - DNA, 15 bp, Homo sapiens
cacctggccaacagg

SEQ ID NO: 1905440 - DNA, 15 bp, Homo sapiens
acctggccaacaggg

SEQ ID NO: 1905441 - DNA, 15 bp, Homo sapiens
cctggccaacaggga

SEQ ID NO: 1905442 - DNA, 15 bp, Homo sapiens
ctggccaacagggag

SEQ ID NO: 1905443 - DNA, 15 bp, Homo sapiens
tggccaacagggagc

SEQ ID NO: 1905444 - DNA, 15 bp, Homo sapiens
ggccaacagggagcc

SEQ ID NO: 1905445 - DNA, 15 bp, Homo sapiens
gccaacagggagcct

SEQ ID NO: 1905446 - DNA, 15 bp, Homo sapiens
ccaacagggagcctt

SEQ ID NO: 1905447 - DNA, 15 bp, Homo sapiens
caacagggagccttc

SEQ ID NO: 1905448 - DNA, 15 bp, Homo sapiens
aacagggagccttct

SEQ ID NO: 1905449 - DNA, 15 bp, Homo sapiens
acagggagccttctc

SEQ ID NO: 1905450 - DNA, 15 bp, Homo sapiens
cagggagccttctct

SEQ ID NO: 1905451 - DNA, 15 bp, Homo sapiens
agggagccttctctt

SEQ ID NO: 1905452 - DNA, 15 bp, Homo sapiens
gggagccttctcttg

SEQ ID NO: 1905453 - DNA, 15 bp, Homo sapiens
ggagccttctcttgg

SEQ ID NO: 1905454 - DNA, 15 bp, Homo sapiens
gagccttctcttggg

SEQ ID NO: 1905455 - DNA, 15 bp, Homo sapiens
agccttctcttgggg

SEQ ID NO: 1905456 - DNA, 15 bp, Homo sapiens
gccttctcttgggga

SEQ ID NO: 1905457 - DNA, 15 bp, Homo sapiens
ccttctcttggggat

SEQ ID NO: 1905458 - DNA, 15 bp, Homo sapiens
cttctcttggggata

SEQ ID NO: 1905459 - DNA, 15 bp, Homo sapiens
ttctcttggggatac

SEQ ID NO: 1905460 - DNA, 15 bp, Homo sapiens
tctcttggggatact

SEQ ID NO: 1905461 - DNA, 15 bp, Homo sapiens
ctcttggggatactg

SEQ ID NO: 1905462 - DNA, 15 bp, Homo sapiens
tcttggggatactgc

SEQ ID NO: 1905463 - DNA, 15 bp, Homo sapiens
cttggggatactgcc

SEQ ID NO: 1905464 - DNA, 15 bp, Homo sapiens
ttggggatactgcct

SEQ ID NO: 1905465 - DNA, 15 bp, Homo sapiens
tggggatactgcctg

SEQ ID NO: 1905466 - DNA, 15 bp, Homo sapiens
ggggatactgcctgc

SEQ ID NO: 1905467 - DNA, 15 bp, Homo sapiens
gggatactgcctgca

SEQ ID NO: 1905468 - DNA, 15 bp, Homo sapiens
ggatactgcctgcag

SEQ ID NO: 1905469 - DNA, 15 bp, Homo sapiens
gatactgcctgcagg

SEQ ID NO: 1905470 - DNA, 15 bp, Homo sapiens
atactgcctgcaggt

SEQ ID NO: 1905471 - DNA, 15 bp, Homo sapiens
tactgcctgcaggtc

SEQ ID NO: 1905472 - DNA, 15 bp, Homo sapiens
actgcctgcaggtcc

SEQ ID NO: 1905473 - DNA, 15 bp, Homo sapiens
ctgcctgcaggtcct

SEQ ID NO: 1905474 - DNA, 15 bp, Homo sapiens
tgcctgcaggtcctg

SEQ ID NO: 1905475 - DNA, 15 bp, Homo sapiens
gcctgcaggtcctgc

SEQ ID NO: 1905476 - DNA, 15 bp, Homo sapiens
cctgcaggtcctgca

SEQ ID NO: 1905477 - DNA, 15 bp, Homo sapiens
ctgcaggtcctgcat

SEQ ID NO: 1905478 - DNA, 15 bp, Homo sapiens
tgcaggtcctgcatg

SEQ ID NO: 1905479 - DNA, 15 bp, Homo sapiens
gcaggtcctgcatgt

SEQ ID NO: 1905480 - DNA, 15 bp, Homo sapiens
caggtcctgcatgta

SEQ ID NO: 1905481 - DNA, 15 bp, Homo sapiens
aggtcctgcatgtat

SEQ ID NO: 1905482 - DNA, 15 bp, Homo sapiens
ggtcctgcatgtatc

SEQ ID NO: 1905483 - DNA, 15 bp, Homo sapiens
gtcctgcatgtatct

SEQ ID NO: 1905484 - DNA, 15 bp, Homo sapiens
tcctgcatgtatctt

SEQ ID NO: 1905485 - DNA, 15 bp, Homo sapiens
cctgcatgtatcttt

SEQ ID NO: 1905486 - DNA, 15 bp, Homo sapiens
ctgcatgtatctttt

SEQ ID NO: 1905487 - DNA, 15 bp, Homo sapiens
tgcatgtatcttttt

SEQ ID NO: 1905488 - DNA, 15 bp, Homo sapiens
gcatgtatctttttt

SEQ ID NO: 1905489 - DNA, 15 bp, Homo sapiens
catgtatcttttttg

SEQ ID NO: 1905490 - DNA, 15 bp, Homo sapiens
atgtatcttttttga

SEQ ID NO: 1905491 - DNA, 15 bp, Homo sapiens
tgtatcttttttgag

SEQ ID NO: 1905492 - DNA, 15 bp, Homo sapiens
gtatcttttttgagg

SEQ ID NO: 1905493 - DNA, 15 bp, Homo sapiens
tatcttttttgaggt

SEQ ID NO: 1905494 - DNA, 15 bp, Homo sapiens
atcttttttgaggtt

SEQ ID NO: 1905495 - DNA, 15 bp, Homo sapiens
tcttttttgaggttt

SEQ ID NO: 1905496 - DNA, 15 bp, Homo sapiens
cttttttgaggtttt

SEQ ID NO: 1905497 - DNA, 15 bp, Homo sapiens
ttttttgaggttttg

SEQ ID NO: 1905498 - DNA, 15 bp, Homo sapiens
tttttgaggttttgg

SEQ ID NO: 1905499 - DNA, 15 bp, Homo sapiens
ttttgaggttttggc

SEQ ID NO: 1905500 - DNA, 15 bp, Homo sapiens
tttgaggttttggct

SEQ ID NO: 1905501 - DNA, 15 bp, Homo sapiens
ttgaggttttggctt

SEQ ID NO: 1905502 - DNA, 15 bp, Homo sapiens
tgaggttttggcttc

SEQ ID NO: 1905503 - DNA, 15 bp, Homo sapiens
gaggttttggcttca

SEQ ID NO: 1905504 - DNA, 15 bp, Homo sapiens
aggttttggcttcat

SEQ ID NO: 1905505 - DNA, 15 bp, Homo sapiens
ggttttggcttcatt

SEQ ID NO: 1905506 - DNA, 15 bp, Homo sapiens
gttttggcttcattt

SEQ ID NO: 1905507 - DNA, 15 bp, Homo sapiens
ttttggcttcatttg

SEQ ID NO: 1905508 - DNA, 15 bp, Homo sapiens
tttggcttcatttga

SEQ ID NO: 1905509 - DNA, 15 bp, Homo sapiens
ttggcttcatttgaa

SEQ ID NO: 1905510 - DNA, 15 bp, Homo sapiens
tggcttcatttgaat

SEQ ID NO: 1905511 - DNA, 15 bp, Homo sapiens
ggcttcatttgaatt

SEQ ID NO: 1905512 - DNA, 15 bp, Homo sapiens
gcttcatttgaattc

SEQ ID NO: 1905513 - DNA, 15 bp, Homo sapiens
cttcatttgaattct

SEQ ID NO: 1905514 - DNA, 15 bp, Homo sapiens
ttcatttgaattctc

SEQ ID NO: 1905515 - DNA, 15 bp, Homo sapiens
tcatttgaattctcc

SEQ ID NO: 1905516 - DNA, 15 bp, Homo sapiens
catttgaattctcct

SEQ ID NO: 1905517 - DNA, 15 bp, Homo sapiens
atttgaattctcctc

SEQ ID NO: 1905518 - DNA, 15 bp, Homo sapiens
tttgaattctcctca

SEQ ID NO: 1905519 - DNA, 15 bp, Homo sapiens
ttgaattctcctcag

SEQ ID NO: 1905520 - DNA, 15 bp, Homo sapiens
tgaattctcctcaga

SEQ ID NO: 1905521 - DNA, 15 bp, Homo sapiens
gaattctcctcagaa

SEQ ID NO: 1905522 - DNA, 15 bp, Homo sapiens
aattctcctcagaaa

SEQ ID NO: 1905523 - DNA, 15 bp, Homo sapiens
attctcctcagaaac

SEQ ID NO: 1905524 - DNA, 15 bp, Homo sapiens
ttctcctcagaaact

SEQ ID NO: 1905525 - DNA, 15 bp, Homo sapiens
tctcctcagaaactt

SEQ ID NO: 1905526 - DNA, 15 bp, Homo sapiens
ctcctcagaaacttt

SEQ ID NO: 1905527 - DNA, 15 bp, Homo sapiens
tcctcagaaacttta

SEQ ID NO: 1905528 - DNA, 15 bp, Homo sapiens
cctcagaaactttat

SEQ ID NO: 1905529 - DNA, 15 bp, Homo sapiens
ctcagaaactttata

SEQ ID NO: 1905530 - DNA, 15 bp, Homo sapiens
tcagaaactttatat

SEQ ID NO: 1905531 - DNA, 15 bp, Homo sapiens
cagaaactttatatt

SEQ ID NO: 1905532 - DNA, 15 bp, Homo sapiens
agaaactttatattt

SEQ ID NO: 1905533 - DNA, 15 bp, Homo sapiens
gaaactttatatttt

SEQ ID NO: 1905534 - DNA, 15 bp, Homo sapiens
aaactttatattttc

SEQ ID NO: 1905535 - DNA, 15 bp, Homo sapiens
aactttatattttct

SEQ ID NO: 1905536 - DNA, 15 bp, Homo sapiens
actttatattttctg

SEQ ID NO: 1905537 - DNA, 15 bp, Homo sapiens
ctttatattttctgt

SEQ ID NO: 1905538 - DNA, 15 bp, Homo sapiens
tttatattttctgtt

SEQ ID NO: 1905539 - DNA, 15 bp, Homo sapiens
ttatattttctgttc

SEQ ID NO: 1905540 - DNA, 15 bp, Homo sapiens
tatattttctgttcc

SEQ ID NO: 1905541 - DNA, 15 bp, Homo sapiens
atattttctgttccc

SEQ ID NO: 1905542 - DNA, 15 bp, Homo sapiens
tattttctgttccca

SEQ ID NO: 1905543 - DNA, 15 bp, Homo sapiens
attttctgttcccaa

SEQ ID NO: 1905544 - DNA, 15 bp, Homo sapiens
ttttctgttcccaag

SEQ ID NO: 1905545 - DNA, 15 bp, Homo sapiens
tttctgttcccaagg

SEQ ID NO: 1905546 - DNA, 15 bp, Homo sapiens
ttctgttcccaagga

SEQ ID NO: 1905547 - DNA, 15 bp, Homo sapiens
tctgttcccaaggaa

SEQ ID NO: 1905548 - DNA, 15 bp, Homo sapiens
ctgttcccaaggaaa

SEQ ID NO: 1905549 - DNA, 15 bp, Homo sapiens
tgttcccaaggaaat

SEQ ID NO: 1905550 - DNA, 15 bp, Homo sapiens
gttcccaaggaaatc

SEQ ID NO: 1905551 - DNA, 15 bp, Homo sapiens
ttcccaaggaaatct

SEQ ID NO: 1905552 - DNA, 15 bp, Homo sapiens
tcccaaggaaatctt

SEQ ID NO: 1905553 - DNA, 15 bp, Homo sapiens
cccaaggaaatcttt

SEQ ID NO: 1905554 - DNA, 15 bp, Homo sapiens
ccaaggaaatctttc

SEQ ID NO: 1905555 - DNA, 15 bp, Homo sapiens
caaggaaatctttct

SEQ ID NO: 1905556 - DNA, 15 bp, Homo sapiens
aaggaaatctttctt

SEQ ID NO: 1905557 - DNA, 15 bp, Homo sapiens
aggaaatctttcttt

SEQ ID NO: 1905558 - DNA, 15 bp, Homo sapiens
ggaaatctttcttta

SEQ ID NO: 1905559 - DNA, 15 bp, Homo sapiens
gaaatctttctttac

SEQ ID NO: 1905560 - DNA, 15 bp, Homo sapiens
aaatctttctttact

SEQ ID NO: 1905561 - DNA, 15 bp, Homo sapiens
aatctttctttactt

SEQ ID NO: 1905562 - DNA, 15 bp, Homo sapiens
atctttctttacttc

SEQ ID NO: 1905563 - DNA, 15 bp, Homo sapiens
tctttctttacttct

SEQ ID NO: 1905564 - DNA, 15 bp, Homo sapiens
ctttctttacttctg

SEQ ID NO: 1905565 - DNA, 15 bp, Homo sapiens
tttctttacttctgt

SEQ ID NO: 1905566 - DNA, 15 bp, Homo sapiens
ttctttacttctgtt

SEQ ID NO: 1905567 - DNA, 15 bp, Homo sapiens
tctttacttctgttt

SEQ ID NO: 1905568 - DNA, 15 bp, Homo sapiens
ctttacttctgtttt

SEQ ID NO: 1905569 - DNA, 15 bp, Homo sapiens
tttacttctgttttt

SEQ ID NO: 1905570 - DNA, 15 bp, Homo sapiens
ttacttctgtttttt

SEQ ID NO: 1905571 - DNA, 15 bp, Homo sapiens
tacttctgttttttt

SEQ ID NO: 1905572 - DNA, 15 bp, Homo sapiens
acttctgtttttttg

SEQ ID NO: 1905573 - DNA, 15 bp, Homo sapiens
cttctgtttttttgt

SEQ ID NO: 1905574 - DNA, 15 bp, Homo sapiens
ttctgtttttttgtt

SEQ ID NO: 1905575 - DNA, 15 bp, Homo sapiens
tctgtttttttgttt

SEQ ID NO: 1905576 - DNA, 15 bp, Homo sapiens
tgtttttttgtttgc

SEQ ID NO: 1905577 - DNA, 15 bp, Homo sapiens
gtttttttgtttgct

SEQ ID NO: 1905578 - DNA, 15 bp, Homo sapiens
tttttttgtttgctt

SEQ ID NO: 1905579 - DNA, 15 bp, Homo sapiens
ttttttgtttgctta

SEQ ID NO: 1905580 - DNA, 15 bp, Homo sapiens
tttttgtttgcttat

SEQ ID NO: 1905581 - DNA, 15 bp, Homo sapiens
ttttgtttgcttatt

SEQ ID NO: 1905582 - DNA, 15 bp, Homo sapiens
tttgtttgcttattt

SEQ ID NO: 1905583 - DNA, 15 bp, Homo sapiens
ttgtttgcttatttt

SEQ ID NO: 1905584 - DNA, 15 bp, Homo sapiens
tgtttgcttatttta

SEQ ID NO: 1905585 - DNA, 15 bp, Homo sapiens
gtttgcttattttaa

SEQ ID NO: 1905586 - DNA, 15 bp, Homo sapiens
tttgcttattttaaa

SEQ ID NO: 1905587 - DNA, 15 bp, Homo sapiens
ttgcttattttaaac

SEQ ID NO: 1905588 - DNA, 15 bp, Homo sapiens
tgcttattttaaaca

SEQ ID NO: 1905589 - DNA, 15 bp, Homo sapiens
gcttattttaaacag

SEQ ID NO: 1905590 - DNA, 15 bp, Homo sapiens
cttattttaaacagg

SEQ ID NO: 1905591 - DNA, 15 bp, Homo sapiens
ttattttaaacagga

SEQ ID NO: 1905592 - DNA, 15 bp, Homo sapiens
tattttaaacaggat

SEQ ID NO: 1905593 - DNA, 15 bp, Homo sapiens
attttaaacaggatc

SEQ ID NO: 1905594 - DNA, 15 bp, Homo sapiens
ttttaaacaggatct

SEQ ID NO: 1905595 - DNA, 15 bp, Homo sapiens
tttaaacaggatcta

SEQ ID NO: 1905596 - DNA, 15 bp, Homo sapiens
ttaaacaggatctag

SEQ ID NO: 1905597 - DNA, 15 bp, Homo sapiens
taaacaggatctaga

SEQ ID NO: 1905598 - DNA, 15 bp, Homo sapiens
aaacaggatctagaa

SEQ ID NO: 1905599 - DNA, 15 bp, Homo sapiens
aacaggatctagaac

SEQ ID NO: 1905600 - DNA, 15 bp, Homo sapiens
acaggatctagaaca

SEQ ID NO: 1905601 - DNA, 15 bp, Homo sapiens
caggatctagaacag

SEQ ID NO: 1905602 - DNA, 15 bp, Homo sapiens
aggatctagaacaga

SEQ ID NO: 1905603 - DNA, 15 bp, Homo sapiens
ggatctagaacagaa

SEQ ID NO: 1905604 - DNA, 15 bp, Homo sapiens
gatctagaacagaaa

SEQ ID NO: 1905605 - DNA, 15 bp, Homo sapiens
atctagaacagaaaa

SEQ ID NO: 1905606 - DNA, 15 bp, Homo sapiens
tctagaacagaaaat

SEQ ID NO: 1905607 - DNA, 15 bp, Homo sapiens
ctagaacagaaaatg

SEQ ID NO: 1905608 - DNA, 15 bp, Homo sapiens
tagaacagaaaatga

SEQ ID NO: 1905609 - DNA, 15 bp, Homo sapiens
agaacagaaaatgaa

SEQ ID NO: 1905610 - DNA, 15 bp, Homo sapiens
gaacagaaaatgaaa

SEQ ID NO: 1905611 - DNA, 15 bp, Homo sapiens
aacagaaaatgaaag

SEQ ID NO: 1905612 - DNA, 15 bp, Homo sapiens
acagaaaatgaaagt

SEQ ID NO: 1905613 - DNA, 15 bp, Homo sapiens
cagaaaatgaaagtg

SEQ ID NO: 1905614 - DNA, 15 bp, Homo sapiens
agaaaatgaaagtgg

SEQ ID NO: 1905615 - DNA, 15 bp, Homo sapiens
gaaaatgaaagtggt

SEQ ID NO: 1905616 - DNA, 15 bp, Homo sapiens
aaaatgaaagtggta

SEQ ID NO: 1905617 - DNA, 15 bp, Homo sapiens
aaatgaaagtggtag

SEQ ID NO: 1905618 - DNA, 15 bp, Homo sapiens
aatgaaagtggtaga

SEQ ID NO: 1905619 - DNA, 15 bp, Homo sapiens
atgaaagtggtagag

SEQ ID NO: 1905620 - DNA, 15 bp, Homo sapiens
tgaaagtggtagaga

SEQ ID NO: 1905621 - DNA, 15 bp, Homo sapiens
gaaagtggtagagaa

SEQ ID NO: 1905622 - DNA, 15 bp, Homo sapiens
aaagtggtagagaat

SEQ ID NO: 1905623 - DNA, 15 bp, Homo sapiens
aagtggtagagaatc

SEQ ID NO: 1905624 - DNA, 15 bp, Homo sapiens
agtggtagagaatct

SEQ ID NO: 1905625 - DNA, 15 bp, Homo sapiens
gtggtagagaatctc

SEQ ID NO: 1905626 - DNA, 15 bp, Homo sapiens
tggtagagaatctcc

SEQ ID NO: 1905627 - DNA, 15 bp, Homo sapiens
ggtagagaatctcca

SEQ ID NO: 1905628 - DNA, 15 bp, Homo sapiens
gtagagaatctccag

SEQ ID NO: 1905629 - DNA, 15 bp, Homo sapiens
tagagaatctccagg

SEQ ID NO: 1905630 - DNA, 15 bp, Homo sapiens
agagaatctccagga

SEQ ID NO: 1905631 - DNA, 15 bp, Homo sapiens
gagaatctccaggat

SEQ ID NO: 1905632 - DNA, 15 bp, Homo sapiens
agaatctccaggatg

SEQ ID NO: 1905633 - DNA, 15 bp, Homo sapiens
gaatctccaggatga

SEQ ID NO: 1905634 - DNA, 15 bp, Homo sapiens
aatctccaggatgac

SEQ ID NO: 1905635 - DNA, 15 bp, Homo sapiens
atctccaggatgact

SEQ ID NO: 1905636 - DNA, 15 bp, Homo sapiens
tctccaggatgactt

SEQ ID NO: 1905637 - DNA, 15 bp, Homo sapiens
ctccaggatgacttt

SEQ ID NO: 1905638 - DNA, 15 bp, Homo sapiens
tccaggatgactttg

SEQ ID NO: 1905639 - DNA, 15 bp, Homo sapiens
ccaggatgactttga

SEQ ID NO: 1905640 - DNA, 15 bp, Homo sapiens
caggatgactttgat

SEQ ID NO: 1905641 - DNA, 15 bp, Homo sapiens
ggatgactttgattt

SEQ ID NO: 1905642 - DNA, 15 bp, Homo sapiens
gatgactttgatttc

SEQ ID NO: 1905643 - DNA, 15 bp, Homo sapiens
atgactttgatttca

SEQ ID NO: 1905644 - DNA, 15 bp, Homo sapiens
tgactttgatttcaa

SEQ ID NO: 1905645 - DNA, 15 bp, Homo sapiens
gactttgatttcaac

SEQ ID NO: 1905646 - DNA, 15 bp, Homo sapiens
actttgatttcaact

SEQ ID NO: 1905647 - DNA, 15 bp, Homo sapiens
ctttgatttcaacta

SEQ ID NO: 1905648 - DNA, 15 bp, Homo sapiens
tttgatttcaactat

SEQ ID NO: 1905649 - DNA, 15 bp, Homo sapiens
ttgatttcaactata

SEQ ID NO: 1905650 - DNA, 15 bp, Homo sapiens
tgatttcaactataa

SEQ ID NO: 1905651 - DNA, 15 bp, Homo sapiens
gatttcaactataaa

SEQ ID NO: 1905652 - DNA, 15 bp, Homo sapiens
atttcaactataaaa

SEQ ID NO: 1905653 - DNA, 15 bp, Homo sapiens
tttcaactataaaac

SEQ ID NO: 1905654 - DNA, 15 bp, Homo sapiens
ttcaactataaaacc

SEQ ID NO: 1905655 - DNA, 15 bp, Homo sapiens
tcaactataaaaccc

SEQ ID NO: 1905656 - DNA, 15 bp, Homo sapiens
caactataaaaccct

SEQ ID NO: 1905657 - DNA, 15 bp, Homo sapiens
aactataaaaccctc

SEQ ID NO: 1905658 - DNA, 15 bp, Homo sapiens
actataaaaccctca

SEQ ID NO: 1905659 - DNA, 15 bp, Homo sapiens
tataaaaccctcaag

SEQ ID NO: 1905660 - DNA, 15 bp, Homo sapiens
ataaaaccctcaaga

SEQ ID NO: 1905661 - DNA, 15 bp, Homo sapiens
taaaaccctcaagag

SEQ ID NO: 1905662 - DNA, 15 bp, Homo sapiens
aaaaccctcaagagt

SEQ ID NO: 1905663 - DNA, 15 bp, Homo sapiens
aaaccctcaagagtc

SEQ ID NO: 1905664 - DNA, 15 bp, Homo sapiens
aaccctcaagagtca

SEQ ID NO: 1905665 - DNA, 15 bp, Homo sapiens
accctcaagagtcaa

SEQ ID NO: 1905666 - DNA, 15 bp, Homo sapiens
ccctcaagagtcaag

SEQ ID NO: 1905667 - DNA, 15 bp, Homo sapiens
cctcaagagtcaagg

SEQ ID NO: 1905668 - DNA, 15 bp, Homo sapiens
ctcaagagtcaagga

SEQ ID NO: 1905669 - DNA, 15 bp, Homo sapiens
tcaagagtcaaggag

SEQ ID NO: 1905670 - DNA, 15 bp, Homo sapiens
caagagtcaaggagg

SEQ ID NO: 1905671 - DNA, 15 bp, Homo sapiens
aagagtcaaggaggc

SEQ ID NO: 1905672 - DNA, 15 bp, Homo sapiens
agagtcaaggaggca

SEQ ID NO: 1905673 - DNA, 15 bp, Homo sapiens
gagtcaaggaggcaa

SEQ ID NO: 1905674 - DNA, 15 bp, Homo sapiens
agtcaaggaggcaag

SEQ ID NO: 1905675 - DNA, 15 bp, Homo sapiens
gtcaaggaggcaagt

SEQ ID NO: 1905676 - DNA, 15 bp, Homo sapiens
tcaaggaggcaagtg

SEQ ID NO: 1905677 - DNA, 15 bp, Homo sapiens
caaggaggcaagtga

SEQ ID NO: 1905678 - DNA, 15 bp, Homo sapiens
aaggaggcaagtgaa

SEQ ID NO: 1905679 - DNA, 15 bp, Homo sapiens
aggaggcaagtgaat

SEQ ID NO: 1905680 - DNA, 15 bp, Homo sapiens
ggaggcaagtgaata

SEQ ID NO: 1905681 - DNA, 15 bp, Homo sapiens
gaggcaagtgaatat

SEQ ID NO: 1905682 - DNA, 15 bp, Homo sapiens
aggcaagtgaatatt

SEQ ID NO: 1905683 - DNA, 15 bp, Homo sapiens
ggcaagtgaatatta

SEQ ID NO: 1905684 - DNA, 15 bp, Homo sapiens
gcaagtgaatattag

SEQ ID NO: 1905685 - DNA, 15 bp, Homo sapiens
caagtgaatattaga

SEQ ID NO: 1905686 - DNA, 15 bp, Homo sapiens
aagtgaatattagag

SEQ ID NO: 1905687 - DNA, 15 bp, Homo sapiens
agtgaatattagaga

SEQ ID NO: 1905688 - DNA, 15 bp, Homo sapiens
gtgaatattagagat

SEQ ID NO: 1905689 - DNA, 15 bp, Homo sapiens
tgaatattagagatg

SEQ ID NO: 1905690 - DNA, 15 bp, Homo sapiens
gaatattagagatgt

SEQ ID NO: 1905691 - DNA, 15 bp, Homo sapiens
aatattagagatgtt

SEQ ID NO: 1905692 - DNA, 15 bp, Homo sapiens
atattagagatgtta

SEQ ID NO: 1905693 - DNA, 15 bp, Homo sapiens
tattagagatgttaa

SEQ ID NO: 1905694 - DNA, 15 bp, Homo sapiens
attagagatgttaaa

SEQ ID NO: 1905695 - DNA, 15 bp, Homo sapiens
ttagagatgttaaaa

SEQ ID NO: 1905696 - DNA, 15 bp, Homo sapiens
tagagatgttaaaat

SEQ ID NO: 1905697 - DNA, 15 bp, Homo sapiens
agagatgttaaaatc

SEQ ID NO: 1905698 - DNA, 15 bp, Homo sapiens
gagatgttaaaatct

SEQ ID NO: 1905699 - DNA, 15 bp, Homo sapiens
agatgttaaaatctc

SEQ ID NO: 1905700 - DNA, 15 bp, Homo sapiens
gatgttaaaatctct

SEQ ID NO: 1905701 - DNA, 15 bp, Homo sapiens
atgttaaaatctcta

SEQ ID NO: 1905702 - DNA, 15 bp, Homo sapiens
tgttaaaatctctag

SEQ ID NO: 1905703 - DNA, 15 bp, Homo sapiens
gttaaaatctctaga

SEQ ID NO: 1905704 - DNA, 15 bp, Homo sapiens
ttaaaatctctagaa

SEQ ID NO: 1905705 - DNA, 15 bp, Homo sapiens
taaaatctctagaaa

SEQ ID NO: 1905706 - DNA, 15 bp, Homo sapiens
aaaatctctagaaag

SEQ ID NO: 1905707 - DNA, 15 bp, Homo sapiens
aaatctctagaaagt

SEQ ID NO: 1905708 - DNA, 15 bp, Homo sapiens
aatctctagaaagtg

SEQ ID NO: 1905709 - DNA, 15 bp, Homo sapiens
atctctagaaagtga

SEQ ID NO: 1905710 - DNA, 15 bp, Homo sapiens
tctctagaaagtgag

SEQ ID NO: 1905711 - DNA, 15 bp, Homo sapiens
ctctagaaagtgagt

SEQ ID NO: 1905712 - DNA, 15 bp, Homo sapiens
tctagaaagtgagtt

SEQ ID NO: 1905713 - DNA, 15 bp, Homo sapiens
ctagaaagtgagttt

SEQ ID NO: 1905714 - DNA, 15 bp, Homo sapiens
tagaaagtgagtttg

SEQ ID NO: 1905715 - DNA, 15 bp, Homo sapiens
agaaagtgagtttgt

SEQ ID NO: 1905716 - DNA, 15 bp, Homo sapiens
gaaagtgagtttgtg

SEQ ID NO: 1905717 - DNA, 15 bp, Homo sapiens
aaagtgagtttgtgt

SEQ ID NO: 1905718 - DNA, 15 bp, Homo sapiens
aagtgagtttgtgtt

SEQ ID NO: 1905719 - DNA, 15 bp, Homo sapiens
agtgagtttgtgttg

SEQ ID NO: 1905720 - DNA, 15 bp, Homo sapiens
gtgagtttgtgttgt

SEQ ID NO: 1905721 - DNA, 15 bp, Homo sapiens
tgagtttgtgttgtt

SEQ ID NO: 1905722 - DNA, 15 bp, Homo sapiens
gagtttgtgttgttg

SEQ ID NO: 1905723 - DNA, 15 bp, Homo sapiens
agtttgtgttgttga

SEQ ID NO: 1905724 - DNA, 15 bp, Homo sapiens
gtttgtgttgttgag

SEQ ID NO: 1905725 - DNA, 15 bp, Homo sapiens
tttgtgttgttgagt

SEQ ID NO: 1905726 - DNA, 15 bp, Homo sapiens
ttgtgttgttgagtt

SEQ ID NO: 1905727 - DNA, 15 bp, Homo sapiens
tgtgttgttgagttg

SEQ ID NO: 1905728 - DNA, 15 bp, Homo sapiens
gtgttgttgagttga

SEQ ID NO: 1905729 - DNA, 15 bp, Homo sapiens
tgttgttgagttgaa

SEQ ID NO: 1905730 - DNA, 15 bp, Homo sapiens
gttgttgagttgaaa

SEQ ID NO: 1905731 - DNA, 15 bp, Homo sapiens
ttgttgagttgaaag

SEQ ID NO: 1905732 - DNA, 15 bp, Homo sapiens
tgttgagttgaaaga

SEQ ID NO: 1905733 - DNA, 15 bp, Homo sapiens
gttgagttgaaagac

SEQ ID NO: 1905734 - DNA, 15 bp, Homo sapiens
ttgagttgaaagact

SEQ ID NO: 1905735 - DNA, 15 bp, Homo sapiens
tgagttgaaagactc

SEQ ID NO: 1905736 - DNA, 15 bp, Homo sapiens
gagttgaaagactca

SEQ ID NO: 1905737 - DNA, 15 bp, Homo sapiens
agttgaaagactcat

SEQ ID NO: 1905738 - DNA, 15 bp, Homo sapiens
gttgaaagactcatt

SEQ ID NO: 1905739 - DNA, 15 bp, Homo sapiens
ttgaaagactcattt

SEQ ID NO: 1905740 - DNA, 15 bp, Homo sapiens
tgaaagactcatttg

SEQ ID NO: 1905741 - DNA, 15 bp, Homo sapiens
gaaagactcatttgt

SEQ ID NO: 1905742 - DNA, 15 bp, Homo sapiens
aaagactcatttgtc

SEQ ID NO: 1905743 - DNA, 15 bp, Homo sapiens
aagactcatttgtct

SEQ ID NO: 1905744 - DNA, 15 bp, Homo sapiens
agactcatttgtctt

SEQ ID NO: 1905745 - DNA, 15 bp, Homo sapiens
gactcatttgtctta

SEQ ID NO: 1905746 - DNA, 15 bp, Homo sapiens
actcatttgtcttaa

SEQ ID NO: 1905747 - DNA, 15 bp, Homo sapiens
ctcatttgtcttaac

SEQ ID NO: 1905748 - DNA, 15 bp, Homo sapiens
tcatttgtcttaact

SEQ ID NO: 1905749 - DNA, 15 bp, Homo sapiens
catttgtcttaactc

SEQ ID NO: 1905750 - DNA, 15 bp, Homo sapiens
atttgtcttaactct

SEQ ID NO: 1905751 - DNA, 15 bp, Homo sapiens
tttgtcttaactctg

SEQ ID NO: 1905752 - DNA, 15 bp, Homo sapiens
ttgtcttaactctgt

SEQ ID NO: 1905753 - DNA, 15 bp, Homo sapiens
tgtcttaactctgtt

SEQ ID NO: 1905754 - DNA, 15 bp, Homo sapiens
gtcttaactctgttt

SEQ ID NO: 1905755 - DNA, 15 bp, Homo sapiens
tcttaactctgttta

SEQ ID NO: 1905756 - DNA, 15 bp, Homo sapiens
cttaactctgtttag

SEQ ID NO: 1905757 - DNA, 15 bp, Homo sapiens
ttaactctgtttaga

SEQ ID NO: 1905758 - DNA, 15 bp, Homo sapiens
taactctgtttagat

SEQ ID NO: 1905759 - DNA, 15 bp, Homo sapiens
aactctgtttagatc

SEQ ID NO: 1905760 - DNA, 15 bp, Homo sapiens
actctgtttagatct

SEQ ID NO: 1905761 - DNA, 15 bp, Homo sapiens
ctctgtttagatctt

SEQ ID NO: 1905762 - DNA, 15 bp, Homo sapiens
tctgtttagatctta

SEQ ID NO: 1905763 - DNA, 15 bp, Homo sapiens
ctgtttagatcttaa

SEQ ID NO: 1905764 - DNA, 15 bp, Homo sapiens
tgtttagatcttaag

SEQ ID NO: 1905765 - DNA, 15 bp, Homo sapiens
gtttagatcttaagg

SEQ ID NO: 1905766 - DNA, 15 bp, Homo sapiens
tttagatcttaaggc

SEQ ID NO: 1905767 - DNA, 15 bp, Homo sapiens
ttagatcttaaggcg

SEQ ID NO: 1905768 - DNA, 15 bp, Homo sapiens
tagatcttaaggcgg

SEQ ID NO: 1905769 - DNA, 15 bp, Homo sapiens
agatcttaaggcggg

SEQ ID NO: 1905770 - DNA, 15 bp, Homo sapiens
gatcttaaggcgggc

SEQ ID NO: 1905771 - DNA, 15 bp, Homo sapiens
atcttaaggcgggcg

SEQ ID NO: 1905772 - DNA, 15 bp, Homo sapiens
tcttaaggcgggcgg

SEQ ID NO: 1905773 - DNA, 15 bp, Homo sapiens
cttaaggcgggcggg

SEQ ID NO: 1905774 - DNA, 15 bp, Homo sapiens
ttaaggcgggcgggg

SEQ ID NO: 1905775 - DNA, 15 bp, Homo sapiens
taaggcgggcggggc

SEQ ID NO: 1905776 - DNA, 15 bp, Homo sapiens
aaggcgggcggggcg

SEQ ID NO: 1905777 - DNA, 15 bp, Homo sapiens
aggcgggcggggcgc

SEQ ID NO: 1905778 - DNA, 15 bp, Homo sapiens
ggcgggcggggcgca

SEQ ID NO: 1905779 - DNA, 15 bp, Homo sapiens
gcgggcggggcgcaa

SEQ ID NO: 1905780 - DNA, 15 bp, Homo sapiens
cgggcggggcgcaag

SEQ ID NO: 1905781 - DNA, 15 bp, Homo sapiens
gggcggggcgcaagg

SEQ ID NO: 1905782 - DNA, 15 bp, Homo sapiens
ggcggggcgcaaggg

SEQ ID NO: 1905783 - DNA, 15 bp, Homo sapiens
gcggggcgcaaggga

SEQ ID NO: 1905784 - DNA, 15 bp, Homo sapiens
cggggcgcaagggag

SEQ ID NO: 1905785 - DNA, 15 bp, Homo sapiens
ggggcgcaagggagg

SEQ ID NO: 1905786 - DNA, 15 bp, Homo sapiens
gggcgcaagggaggt

SEQ ID NO: 1905787 - DNA, 15 bp, Homo sapiens
ggcgcaagggaggta

SEQ ID NO: 1905788 - DNA, 15 bp, Homo sapiens
gcgcaagggaggtac

SEQ ID NO: 1905789 - DNA, 15 bp, Homo sapiens
cgcaagggaggtacg

SEQ ID NO: 1905790 - DNA, 15 bp, Homo sapiens
gcaagggaggtacgg

SEQ ID NO: 1905791 - DNA, 15 bp, Homo sapiens
caagggaggtacggg

SEQ ID NO: 1905792 - DNA, 15 bp, Homo sapiens
aagggaggtacgggt

SEQ ID NO: 1905793 - DNA, 15 bp, Homo sapiens
agggaggtacgggtc

SEQ ID NO: 1905794 - DNA, 15 bp, Homo sapiens
gggaggtacgggtcc

SEQ ID NO: 1905795 - DNA, 15 bp, Homo sapiens
ggaggtacgggtcct

SEQ ID NO: 1905796 - DNA, 15 bp, Homo sapiens
gaggtacgggtcctc

SEQ ID NO: 1905797 - DNA, 15 bp, Homo sapiens
aggtacgggtcctca

SEQ ID NO: 1905798 - DNA, 15 bp, Homo sapiens
ggtacgggtcctcaa

SEQ ID NO: 1905799 - DNA, 15 bp, Homo sapiens
gtacgggtcctcaaa

SEQ ID NO: 1905800 - DNA, 15 bp, Homo sapiens
tacgggtcctcaaag

SEQ ID NO: 1905801 - DNA, 15 bp, Homo sapiens
acgggtcctcaaagg

SEQ ID NO: 1905802 - DNA, 15 bp, Homo sapiens
cgggtcctcaaagga

SEQ ID NO: 1905803 - DNA, 15 bp, Homo sapiens
gggtcctcaaaggag

SEQ ID NO: 1905804 - DNA, 15 bp, Homo sapiens
ggtcctcaaaggagc

SEQ ID NO: 1905805 - DNA, 15 bp, Homo sapiens
gtcctcaaaggagcc

SEQ ID NO: 1905806 - DNA, 15 bp, Homo sapiens
tcctcaaaggagcct

SEQ ID NO: 1905807 - DNA, 15 bp, Homo sapiens
cctcaaaggagcctg

SEQ ID NO: 1905808 - DNA, 15 bp, Homo sapiens
ctcaaaggagcctgg

SEQ ID NO: 1905809 - DNA, 15 bp, Homo sapiens
tcaaaggagcctggt

SEQ ID NO: 1905810 - DNA, 15 bp, Homo sapiens
caaaggagcctggtc

SEQ ID NO: 1905811 - DNA, 15 bp, Homo sapiens
aaaggagcctggtca

SEQ ID NO: 1905812 - DNA, 15 bp, Homo sapiens
aaggagcctggtcat

SEQ ID NO: 1905813 - DNA, 15 bp, Homo sapiens
aggagcctggtcatt

SEQ ID NO: 1905814 - DNA, 15 bp, Homo sapiens
ggagcctggtcatta

SEQ ID NO: 1905815 - DNA, 15 bp, Homo sapiens
gagcctggtcattaa

SEQ ID NO: 1905816 - DNA, 15 bp, Homo sapiens
agcctggtcattaag

SEQ ID NO: 1905817 - DNA, 15 bp, Homo sapiens
gcctggtcattaagg

SEQ ID NO: 1905818 - DNA, 15 bp, Homo sapiens
cctggtcattaagga

SEQ ID NO: 1905819 - DNA, 15 bp, Homo sapiens
ctggtcattaaggac

SEQ ID NO: 1905820 - DNA, 15 bp, Homo sapiens
tggtcattaaggaca

SEQ ID NO: 1905821 - DNA, 15 bp, Homo sapiens
ggtcattaaggacag

SEQ ID NO: 1905822 - DNA, 15 bp, Homo sapiens
gtcattaaggacagg

SEQ ID NO: 1905823 - DNA, 15 bp, Homo sapiens
tcattaaggacagga

SEQ ID NO: 1905824 - DNA, 15 bp, Homo sapiens
cattaaggacaggag

SEQ ID NO: 1905825 - DNA, 15 bp, Homo sapiens
attaaggacaggagt

SEQ ID NO: 1905826 - DNA, 15 bp, Homo sapiens
ttaaggacaggagta

SEQ ID NO: 1905827 - DNA, 15 bp, Homo sapiens
taaggacaggagtat

SEQ ID NO: 1905828 - DNA, 15 bp, Homo sapiens
aaggacaggagtatt

SEQ ID NO: 1905829 - DNA, 15 bp, Homo sapiens
aggacaggagtattc

SEQ ID NO: 1905830 - DNA, 15 bp, Homo sapiens
ggacaggagtattcc

SEQ ID NO: 1905831 - DNA, 15 bp, Homo sapiens
gacaggagtattccc

SEQ ID NO: 1905832 - DNA, 15 bp, Homo sapiens
acaggagtattccct

SEQ ID NO: 1905833 - DNA, 15 bp, Homo sapiens
caggagtattccctc

SEQ ID NO: 1905834 - DNA, 15 bp, Homo sapiens
aggagtattccctca

SEQ ID NO: 1905835 - DNA, 15 bp, Homo sapiens
ggagtattccctcag

SEQ ID NO: 1905836 - DNA, 15 bp, Homo sapiens
gagtattccctcagg

SEQ ID NO: 1905837 - DNA, 15 bp, Homo sapiens
agtattccctcaggt

SEQ ID NO: 1905838 - DNA, 15 bp, Homo sapiens
gtattccctcaggtc

SEQ ID NO: 1905839 - DNA, 15 bp, Homo sapiens
tattccctcaggtcc

SEQ ID NO: 1905840 - DNA, 15 bp, Homo sapiens
attccctcaggtcca

SEQ ID NO: 1905841 - DNA, 15 bp, Homo sapiens
ttccctcaggtccag

SEQ ID NO: 1905842 - DNA, 15 bp, Homo sapiens
tccctcaggtccagg

SEQ ID NO: 1905843 - DNA, 15 bp, Homo sapiens
ccctcaggtccagga

SEQ ID NO: 1905844 - DNA, 15 bp, Homo sapiens
cctcaggtccaggag

SEQ ID NO: 1905845 - DNA, 15 bp, Homo sapiens
ctcaggtccaggagt

SEQ ID NO: 1905846 - DNA, 15 bp, Homo sapiens
tcaggtccaggagta

SEQ ID NO: 1905847 - DNA, 15 bp, Homo sapiens
caggtccaggagtat

SEQ ID NO: 1905848 - DNA, 15 bp, Homo sapiens
aggtccaggagtatt

SEQ ID NO: 1905849 - DNA, 15 bp, Homo sapiens
ggtccaggagtattc

SEQ ID NO: 1905850 - DNA, 15 bp, Homo sapiens
gtccaggagtattcc

SEQ ID NO: 1905851 - DNA, 15 bp, Homo sapiens
tccaggagtattccc

SEQ ID NO: 1905852 - DNA, 15 bp, Homo sapiens
ccaggagtattccct

SEQ ID NO: 1905853 - DNA, 15 bp, Homo sapiens
tattccctcaggtca

SEQ ID NO: 1905854 - DNA, 15 bp, Homo sapiens
attccctcaggtcaa

SEQ ID NO: 1905855 - DNA, 15 bp, Homo sapiens
ttccctcaggtcaag

SEQ ID NO: 1905856 - DNA, 15 bp, Homo sapiens
tccctcaggtcaagg

SEQ ID NO: 1905857 - DNA, 15 bp, Homo sapiens
ccctcaggtcaagga

SEQ ID NO: 1905858 - DNA, 15 bp, Homo sapiens
cctcaggtcaaggag

SEQ ID NO: 1905859 - DNA, 15 bp, Homo sapiens
ctcaggtcaaggagt

SEQ ID NO: 1905860 - DNA, 15 bp, Homo sapiens
tcaggtcaaggagta

SEQ ID NO: 1905861 - DNA, 15 bp, Homo sapiens
caggtcaaggagtat

SEQ ID NO: 1905862 - DNA, 15 bp, Homo sapiens
aggtcaaggagtatt

SEQ ID NO: 1905863 - DNA, 15 bp, Homo sapiens
ggtcaaggagtattc

SEQ ID NO: 1905864 - DNA, 15 bp, Homo sapiens
gtcaaggagtattcc

SEQ ID NO: 1905865 - DNA, 15 bp, Homo sapiens
tcaaggagtattccc

SEQ ID NO: 1905866 - DNA, 15 bp, Homo sapiens
caaggagtattccct

SEQ ID NO: 1905867 - DNA, 15 bp, Homo sapiens
aaggagtattccctc

SEQ ID NO: 1905868 - DNA, 15 bp, Homo sapiens
ctgctctggagttga

SEQ ID NO: 1905869 - DNA, 15 bp, Homo sapiens
tgctctggagttgac

SEQ ID NO: 1905870 - DNA, 15 bp, Homo sapiens
gctctggagttgact

SEQ ID NO: 1905871 - DNA, 15 bp, Homo sapiens
ctctggagttgacta

SEQ ID NO: 1905872 - DNA, 15 bp, Homo sapiens
tctggagttgactaa

SEQ ID NO: 1905873 - DNA, 15 bp, Homo sapiens
ctggagttgactaaa

SEQ ID NO: 1905874 - DNA, 15 bp, Homo sapiens
tggagttgactaaag

SEQ ID NO: 1905875 - DNA, 15 bp, Homo sapiens
ggagttgactaaaga

SEQ ID NO: 1905876 - DNA, 15 bp, Homo sapiens
gagttgactaaagaa

SEQ ID NO: 1905877 - DNA, 15 bp, Homo sapiens
agttgactaaagaat

SEQ ID NO: 1905878 - DNA, 15 bp, Homo sapiens
gttgactaaagaatg

SEQ ID NO: 1905879 - DNA, 15 bp, Homo sapiens
ttgactaaagaatgt

SEQ ID NO: 1905880 - DNA, 15 bp, Homo sapiens
tgactaaagaatgtg

SEQ ID NO: 1905881 - DNA, 15 bp, Homo sapiens
gactaaagaatgtgg

SEQ ID NO: 1905882 - DNA, 15 bp, Homo sapiens
actaaagaatgtggt

SEQ ID NO: 1905883 - DNA, 15 bp, Homo sapiens
ctaaagaatgtggtt

SEQ ID NO: 1905884 - DNA, 15 bp, Homo sapiens
taaagaatgtggtta

SEQ ID NO: 1905885 - DNA, 15 bp, Homo sapiens
aaagaatgtggttag

SEQ ID NO: 1905886 - DNA, 15 bp, Homo sapiens
aagaatgtggttaga

SEQ ID NO: 1905887 - DNA, 15 bp, Homo sapiens
agaatgtggttagag

SEQ ID NO: 1905888 - DNA, 15 bp, Homo sapiens
gaatgtggttagaga

SEQ ID NO: 1905889 - DNA, 15 bp, Homo sapiens
aatgtggttagagac

SEQ ID NO: 1905890 - DNA, 15 bp, Homo sapiens
atgtggttagagaca

SEQ ID NO: 1905891 - DNA, 15 bp, Homo sapiens
tgtggttagagacag

SEQ ID NO: 1905892 - DNA, 15 bp, Homo sapiens
gtggttagagacagt

SEQ ID NO: 1905893 - DNA, 15 bp, Homo sapiens
tggttagagacagtc

SEQ ID NO: 1905894 - DNA, 15 bp, Homo sapiens
ggttagagacagtct

SEQ ID NO: 1905895 - DNA, 15 bp, Homo sapiens
gttagagacagtctg

SEQ ID NO: 1905896 - DNA, 15 bp, Homo sapiens
ttagagacagtctga

SEQ ID NO: 1905897 - DNA, 15 bp, Homo sapiens
tagagacagtctgag

SEQ ID NO: 1905898 - DNA, 15 bp, Homo sapiens
agagacagtctgagg

SEQ ID NO: 1905899 - DNA, 15 bp, Homo sapiens
gagacagtctgagga

SEQ ID NO: 1905900 - DNA, 15 bp, Homo sapiens
agacagtctgaggaa

SEQ ID NO: 1905901 - DNA, 15 bp, Homo sapiens
gacagtctgaggaaa

SEQ ID NO: 1905902 - DNA, 15 bp, Homo sapiens
acagtctgaggaaat

SEQ ID NO: 1905903 - DNA, 15 bp, Homo sapiens
cagtctgaggaaatg

SEQ ID NO: 1905904 - DNA, 15 bp, Homo sapiens
agtctgaggaaatgt

SEQ ID NO: 1905905 - DNA, 15 bp, Homo sapiens
gtctgaggaaatgtt

SEQ ID NO: 1905906 - DNA, 15 bp, Homo sapiens
tctgaggaaatgttt

SEQ ID NO: 1905907 - DNA, 15 bp, Homo sapiens
ctgaggaaatgtttt

SEQ ID NO: 1905908 - DNA, 15 bp, Homo sapiens
tgaggaaatgttttc

SEQ ID NO: 1905909 - DNA, 15 bp, Homo sapiens
gaggaaatgttttct

SEQ ID NO: 1905910 - DNA, 15 bp, Homo sapiens
aggaaatgttttctg

SEQ ID NO: 1905911 - DNA, 15 bp, Homo sapiens
ggaaatgttttctga

SEQ ID NO: 1905912 - DNA, 15 bp, Homo sapiens
gaaatgttttctgac

SEQ ID NO: 1905913 - DNA, 15 bp, Homo sapiens
aaatgttttctgact

SEQ ID NO: 1905914 - DNA, 15 bp, Homo sapiens
aatgttttctgactt

SEQ ID NO: 1905915 - DNA, 15 bp, Homo sapiens
atgttttctgacttt

SEQ ID NO: 1905916 - DNA, 15 bp, Homo sapiens
tgttttctgactttg

SEQ ID NO: 1905917 - DNA, 15 bp, Homo sapiens
gttttctgactttgt

SEQ ID NO: 1905918 - DNA, 15 bp, Homo sapiens
ttttctgactttgtt

SEQ ID NO: 1905919 - DNA, 15 bp, Homo sapiens
tttctgactttgttt

SEQ ID NO: 1905920 - DNA, 15 bp, Homo sapiens
ttctgactttgtttt

SEQ ID NO: 1905921 - DNA, 15 bp, Homo sapiens
tctgactttgttttg

SEQ ID NO: 1905922 - DNA, 15 bp, Homo sapiens
ctgactttgttttgg

SEQ ID NO: 1905923 - DNA, 15 bp, Homo sapiens
tgactttgttttggt

SEQ ID NO: 1905924 - DNA, 15 bp, Homo sapiens
gactttgttttggtt

SEQ ID NO: 1905925 - DNA, 15 bp, Homo sapiens
actttgttttggttt

SEQ ID NO: 1905926 - DNA, 15 bp, Homo sapiens
ctttgttttggtttc

SEQ ID NO: 1905927 - DNA, 15 bp, Homo sapiens
tttgttttggtttcc

SEQ ID NO: 1905928 - DNA, 15 bp, Homo sapiens
ttgttttggtttcca

SEQ ID NO: 1905929 - DNA, 15 bp, Homo sapiens
tgttttggtttccaa

SEQ ID NO: 1905930 - DNA, 15 bp, Homo sapiens
gttttggtttccaac

SEQ ID NO: 1905931 - DNA, 15 bp, Homo sapiens
ttttggtttccaacc

SEQ ID NO: 1905932 - DNA, 15 bp, Homo sapiens
tttggtttccaacca

SEQ ID NO: 1905933 - DNA, 15 bp, Homo sapiens
ttggtttccaaccag

SEQ ID NO: 1905934 - DNA, 15 bp, Homo sapiens
tggtttccaaccaga

SEQ ID NO: 1905935 - DNA, 15 bp, Homo sapiens
ggtttccaaccagag

SEQ ID NO: 1905936 - DNA, 15 bp, Homo sapiens
gtttccaaccagagc

SEQ ID NO: 1905937 - DNA, 15 bp, Homo sapiens
tttccaaccagagca

SEQ ID NO: 1905938 - DNA, 15 bp, Homo sapiens
ttccaaccagagcat

SEQ ID NO: 1905939 - DNA, 15 bp, Homo sapiens
tccaaccagagcatc

SEQ ID NO: 1905940 - DNA, 15 bp, Homo sapiens
ccaaccagagcatcg

SEQ ID NO: 1905941 - DNA, 15 bp, Homo sapiens
caaccagagcatcgt

SEQ ID NO: 1905942 - DNA, 15 bp, Homo sapiens
aaccagagcatcgtg

SEQ ID NO: 1905943 - DNA, 15 bp, Homo sapiens
accagagcatcgtga

SEQ ID NO: 1905944 - DNA, 15 bp, Homo sapiens
ccagagcatcgtgag

SEQ ID NO: 1905945 - DNA, 15 bp, Homo sapiens
cagagcatcgtgagt

SEQ ID NO: 1905946 - DNA, 15 bp, Homo sapiens
agagcatcgtgagtg

SEQ ID NO: 1905947 - DNA, 15 bp, Homo sapiens
gagcatcgtgagtga

SEQ ID NO: 1905948 - DNA, 15 bp, Homo sapiens
agcatcgtgagtgag

SEQ ID NO: 1905949 - DNA, 15 bp, Homo sapiens
gcatcgtgagtgagc

SEQ ID NO: 1905950 - DNA, 15 bp, Homo sapiens
catcgtgagtgagct

SEQ ID NO: 1905951 - DNA, 15 bp, Homo sapiens
atcgtgagtgagctg

SEQ ID NO: 1905952 - DNA, 15 bp, Homo sapiens
tcgtgagtgagctgg

SEQ ID NO: 1905953 - DNA, 15 bp, Homo sapiens
cgtgagtgagctggc

SEQ ID NO: 1905954 - DNA, 15 bp, Homo sapiens
gtgagtgagctggcg

SEQ ID NO: 1905955 - DNA, 15 bp, Homo sapiens
tgagtgagctggcgg

SEQ ID NO: 1905956 - DNA, 15 bp, Homo sapiens
gagtgagctggcggg

SEQ ID NO: 1905957 - DNA, 15 bp, Homo sapiens
agtgagctggcgggg

SEQ ID NO: 1905958 - DNA, 15 bp, Homo sapiens
gtgagctggcggggc

SEQ ID NO: 1905959 - DNA, 15 bp, Homo sapiens
tgagctggcggggct

SEQ ID NO: 1905960 - DNA, 15 bp, Homo sapiens
gagctggcggggctt

SEQ ID NO: 1905961 - DNA, 15 bp, Homo sapiens
agctggcggggcttt

SEQ ID NO: 1905962 - DNA, 15 bp, Homo sapiens
gctggcggggctttt

SEQ ID NO: 1905963 - DNA, 15 bp, Homo sapiens
ctggcggggcttttg

SEQ ID NO: 1905964 - DNA, 15 bp, Homo sapiens
tggcggggcttttgt

SEQ ID NO: 1905965 - DNA, 15 bp, Homo sapiens
ggcggggcttttgtc

SEQ ID NO: 1905966 - DNA, 15 bp, Homo sapiens
gcggggcttttgtca

SEQ ID NO: 1905967 - DNA, 15 bp, Homo sapiens
cggggcttttgtcag

SEQ ID NO: 1905968 - DNA, 15 bp, Homo sapiens
ggggcttttgtcagc

SEQ ID NO: 1905969 - DNA, 15 bp, Homo sapiens
gggcttttgtcagcg

SEQ ID NO: 1905970 - DNA, 15 bp, Homo sapiens
ggcttttgtcagcga

SEQ ID NO: 1905971 - DNA, 15 bp, Homo sapiens
gcttttgtcagcgat

SEQ ID NO: 1905972 - DNA, 15 bp, Homo sapiens
cttttgtcagcgatg

SEQ ID NO: 1905973 - DNA, 15 bp, Homo sapiens
ttttgtcagcgatgg

SEQ ID NO: 1905974 - DNA, 15 bp, Homo sapiens
tttgtcagcgatgga

SEQ ID NO: 1905975 - DNA, 15 bp, Homo sapiens
ttgtcagcgatggag

SEQ ID NO: 1905976 - DNA, 15 bp, Homo sapiens
tgtcagcgatggagt

SEQ ID NO: 1905977 - DNA, 15 bp, Homo sapiens
gtcagcgatggagta

SEQ ID NO: 1905978 - DNA, 15 bp, Homo sapiens
tcagcgatggagtac

SEQ ID NO: 1905979 - DNA, 15 bp, Homo sapiens
cagcgatggagtacg

SEQ ID NO: 1905980 - DNA, 15 bp, Homo sapiens
agcgatggagtacgt

SEQ ID NO: 1905981 - DNA, 15 bp, Homo sapiens
gcgatggagtacgtg

SEQ ID NO: 1905982 - DNA, 15 bp, Homo sapiens
cgatggagtacgtgc

SEQ ID NO: 1905983 - DNA, 15 bp, Homo sapiens
gatggagtacgtgca

SEQ ID NO: 1905984 - DNA, 15 bp, Homo sapiens
atggagtacgtgcag

SEQ ID NO: 1905985 - DNA, 15 bp, Homo sapiens
tggagtacgtgcaga

SEQ ID NO: 1905986 - DNA, 15 bp, Homo sapiens
ggagtacgtgcagaa

SEQ ID NO: 1905987 - DNA, 15 bp, Homo sapiens
gagtacgtgcagaaa

SEQ ID NO: 1905988 - DNA, 15 bp, Homo sapiens
agtacgtgcagaaaa

SEQ ID NO: 1905989 - DNA, 15 bp, Homo sapiens
gtacgtgcagaaaac

SEQ ID NO: 1905990 - DNA, 15 bp, Homo sapiens
tacgtgcagaaaact

SEQ ID NO: 1905991 - DNA, 15 bp, Homo sapiens
acgtgcagaaaactc

SEQ ID NO: 1905992 - DNA, 15 bp, Homo sapiens
cgtgcagaaaactct

SEQ ID NO: 1905993 - DNA, 15 bp, Homo sapiens
gtgcagaaaactctc

SEQ ID NO: 1905994 - DNA, 15 bp, Homo sapiens
tgcagaaaactctca

SEQ ID NO: 1905995 - DNA, 15 bp, Homo sapiens
gcagaaaactctcac

SEQ ID NO: 1905996 - DNA, 15 bp, Homo sapiens
cagaaaactctcacg

SEQ ID NO: 1905997 - DNA, 15 bp, Homo sapiens
agaaaactctcacgg

SEQ ID NO: 1905998 - DNA, 15 bp, Homo sapiens
gaaaactctcacgga

SEQ ID NO: 1905999 - DNA, 15 bp, Homo sapiens
aaaactctcacggac

SEQ ID NO: 1906000 - DNA, 15 bp, Homo sapiens
aaactctcacggacg

SEQ ID NO: 1906001 - DNA, 15 bp, Homo sapiens
aactctcacggacga

SEQ ID NO: 1906002 - DNA, 15 bp, Homo sapiens
actctcacggacgag

SEQ ID NO: 1906003 - DNA, 15 bp, Homo sapiens
ctctcacggacgagg

SEQ ID NO: 1906004 - DNA, 15 bp, Homo sapiens
tctcacggacgagga

SEQ ID NO: 1906005 - DNA, 15 bp, Homo sapiens
ctcacggacgaggag

SEQ ID NO: 1906006 - DNA, 15 bp, Homo sapiens
tcacggacgaggagc

SEQ ID NO: 1906007 - DNA, 15 bp, Homo sapiens
cacggacgaggagct

SEQ ID NO: 1906008 - DNA, 15 bp, Homo sapiens
acggacgaggagctg

SEQ ID NO: 1906009 - DNA, 15 bp, Homo sapiens
cggacgaggagctgg

SEQ ID NO: 1906010 - DNA, 15 bp, Homo sapiens
ggacgaggagctggc

SEQ ID NO: 1906011 - DNA, 15 bp, Homo sapiens
gacgaggagctggct

SEQ ID NO: 1906012 - DNA, 15 bp, Homo sapiens
acgaggagctggctg

SEQ ID NO: 1906013 - DNA, 15 bp, Homo sapiens
cgaggagctggctga

SEQ ID NO: 1906014 - DNA, 15 bp, Homo sapiens
gaggagctggctgac

SEQ ID NO: 1906015 - DNA, 15 bp, Homo sapiens
aggagctggctgact

SEQ ID NO: 1906016 - DNA, 15 bp, Homo sapiens
ggagctggctgactg

SEQ ID NO: 1906017 - DNA, 15 bp, Homo sapiens
gagctggctgactgg

SEQ ID NO: 1906018 - DNA, 15 bp, Homo sapiens
agctggctgactgga

SEQ ID NO: 1906019 - DNA, 15 bp, Homo sapiens
gctggctgactggaa

SEQ ID NO: 1906020 - DNA, 15 bp, Homo sapiens
ctggctgactggaag

SEQ ID NO: 1906021 - DNA, 15 bp, Homo sapiens
tggctgactggaaga

SEQ ID NO: 1906022 - DNA, 15 bp, Homo sapiens
ggctgactggaagag

SEQ ID NO: 1906023 - DNA, 15 bp, Homo sapiens
gctgactggaagagg

SEQ ID NO: 1906024 - DNA, 15 bp, Homo sapiens
ctgactggaagaggc

SEQ ID NO: 1906025 - DNA, 15 bp, Homo sapiens
tgactggaagaggcg

SEQ ID NO: 1906026 - DNA, 15 bp, Homo sapiens
gactggaagaggcgg

SEQ ID NO: 1906027 - DNA, 15 bp, Homo sapiens
actggaagaggcggc

SEQ ID NO: 1906028 - DNA, 15 bp, Homo sapiens
ctggaagaggcggca

SEQ ID NO: 1906029 - DNA, 15 bp, Homo sapiens
tggaagaggcggcaa

SEQ ID NO: 1906030 - DNA, 15 bp, Homo sapiens
ggaagaggcggcaac

SEQ ID NO: 1906031 - DNA, 15 bp, Homo sapiens
gaagaggcggcaaca

SEQ ID NO: 1906032 - DNA, 15 bp, Homo sapiens
aagaggcggcaacag

SEQ ID NO: 1906033 - DNA, 15 bp, Homo sapiens
gaggcggcaacagat

SEQ ID NO: 1906034 - DNA, 15 bp, Homo sapiens
aggcggcaacagatt

SEQ ID NO: 1906035 - DNA, 15 bp, Homo sapiens
ggcggcaacagattg

SEQ ID NO: 1906036 - DNA, 15 bp, Homo sapiens
gcggcaacagattgc

SEQ ID NO: 1906037 - DNA, 15 bp, Homo sapiens
cggcaacagattgcc

SEQ ID NO: 1906038 - DNA, 15 bp, Homo sapiens
ggcaacagattgcct

SEQ ID NO: 1906039 - DNA, 15 bp, Homo sapiens
gcaacagattgcctg

SEQ ID NO: 1906040 - DNA, 15 bp, Homo sapiens
caacagattgcctgc

SEQ ID NO: 1906041 - DNA, 15 bp, Homo sapiens
aacagattgcctgca

SEQ ID NO: 1906042 - DNA, 15 bp, Homo sapiens
acagattgcctgcat

SEQ ID NO: 1906043 - DNA, 15 bp, Homo sapiens
cagattgcctgcatt

SEQ ID NO: 1906044 - DNA, 15 bp, Homo sapiens
agattgcctgcattg

SEQ ID NO: 1906045 - DNA, 15 bp, Homo sapiens
gattgcctgcattgg

SEQ ID NO: 1906046 - DNA, 15 bp, Homo sapiens
attgcctgcattgga

SEQ ID NO: 1906047 - DNA, 15 bp, Homo sapiens
ttgcctgcattggag

SEQ ID NO: 1906048 - DNA, 15 bp, Homo sapiens
tgcctgcattggagg

SEQ ID NO: 1906049 - DNA, 15 bp, Homo sapiens
gcctgcattggaggc

SEQ ID NO: 1906050 - DNA, 15 bp, Homo sapiens
cctgcattggaggcc

SEQ ID NO: 1906051 - DNA, 15 bp, Homo sapiens
ctgcattggaggccc

SEQ ID NO: 1906052 - DNA, 15 bp, Homo sapiens
tgcattggaggcccg

SEQ ID NO: 1906053 - DNA, 15 bp, Homo sapiens
gcattggaggcccgc

SEQ ID NO: 1906054 - DNA, 15 bp, Homo sapiens
cattggaggcccgcc

SEQ ID NO: 1906055 - DNA, 15 bp, Homo sapiens
attggaggcccgccc

SEQ ID NO: 1906056 - DNA, 15 bp, Homo sapiens
ttggaggcccgccca

SEQ ID NO: 1906057 - DNA, 15 bp, Homo sapiens
tggaggcccgcccaa

SEQ ID NO: 1906058 - DNA, 15 bp, Homo sapiens
ggaggcccgcccaac

SEQ ID NO: 1906059 - DNA, 15 bp, Homo sapiens
gaggcccgcccaaca

SEQ ID NO: 1906060 - DNA, 15 bp, Homo sapiens
aggcccgcccaacat

SEQ ID NO: 1906061 - DNA, 15 bp, Homo sapiens
ggcccgcccaacatc

SEQ ID NO: 1906062 - DNA, 15 bp, Homo sapiens
gcccgcccaacatct

SEQ ID NO: 1906063 - DNA, 15 bp, Homo sapiens
cccgcccaacatctg

SEQ ID NO: 1906064 - DNA, 15 bp, Homo sapiens
ccgcccaacatctgc

SEQ ID NO: 1906065 - DNA, 15 bp, Homo sapiens
cgcccaacatctgcc

SEQ ID NO: 1906066 - DNA, 15 bp, Homo sapiens
gcccaacatctgcct

SEQ ID NO: 1906067 - DNA, 15 bp, Homo sapiens
cccaacatctgccta

SEQ ID NO: 1906068 - DNA, 15 bp, Homo sapiens
ccaacatctgcctag

SEQ ID NO: 1906069 - DNA, 15 bp, Homo sapiens
caacatctgcctaga

SEQ ID NO: 1906070 - DNA, 15 bp, Homo sapiens
aacatctgcctagat

SEQ ID NO: 1906071 - DNA, 15 bp, Homo sapiens
acatctgcctagatc

SEQ ID NO: 1906072 - DNA, 15 bp, Homo sapiens
catctgcctagatcg

SEQ ID NO: 1906073 - DNA, 15 bp, Homo sapiens
atctgcctagatcgg

SEQ ID NO: 1906074 - DNA, 15 bp, Homo sapiens
tctgcctagatcggc

SEQ ID NO: 1906075 - DNA, 15 bp, Homo sapiens
ctgcctagatcggct

SEQ ID NO: 1906076 - DNA, 15 bp, Homo sapiens
tgcctagatcggcta

SEQ ID NO: 1906077 - DNA, 15 bp, Homo sapiens
gcctagatcggctag

SEQ ID NO: 1906078 - DNA, 15 bp, Homo sapiens
cctagatcggctaga

SEQ ID NO: 1906079 - DNA, 15 bp, Homo sapiens
ctagatcggctagaa

SEQ ID NO: 1906080 - DNA, 15 bp, Homo sapiens
tagatcggctagaaa

SEQ ID NO: 1906081 - DNA, 15 bp, Homo sapiens
agatcggctagaaaa

SEQ ID NO: 1906082 - DNA, 15 bp, Homo sapiens
gatcggctagaaaac

SEQ ID NO: 1906083 - DNA, 15 bp, Homo sapiens
atcggctagaaaact

SEQ ID NO: 1906084 - DNA, 15 bp, Homo sapiens
tcggctagaaaactg

SEQ ID NO: 1906085 - DNA, 15 bp, Homo sapiens
cggctagaaaactgg

SEQ ID NO: 1906086 - DNA, 15 bp, Homo sapiens
ggctagaaaactggt

SEQ ID NO: 1906087 - DNA, 15 bp, Homo sapiens
gctagaaaactggta

SEQ ID NO: 1906088 - DNA, 15 bp, Homo sapiens
ctagaaaactggtaa

SEQ ID NO: 1906089 - DNA, 15 bp, Homo sapiens
tagaaaactggtaaa

SEQ ID NO: 1906090 - DNA, 15 bp, Homo sapiens
agaaaactggtaaag

SEQ ID NO: 1906091 - DNA, 15 bp, Homo sapiens
gaaaactggtaaagg

SEQ ID NO: 1906092 - DNA, 15 bp, Homo sapiens
aaaactggtaaagga

SEQ ID NO: 1906093 - DNA, 15 bp, Homo sapiens
aaactggtaaaggat

SEQ ID NO: 1906094 - DNA, 15 bp, Homo sapiens
aactggtaaaggatg

SEQ ID NO: 1906095 - DNA, 15 bp, Homo sapiens
actggtaaaggatga

SEQ ID NO: 1906096 - DNA, 15 bp, Homo sapiens
ctggtaaaggatgaa

SEQ ID NO: 1906097 - DNA, 15 bp, Homo sapiens
tggtaaaggatgaaa

SEQ ID NO: 1906098 - DNA, 15 bp, Homo sapiens
ggtaaaggatgaaag

SEQ ID NO: 1906099 - DNA, 15 bp, Homo sapiens
gtaaaggatgaaaga

SEQ ID NO: 1906100 - DNA, 15 bp, Homo sapiens
taaaggatgaaagaa

SEQ ID NO: 1906101 - DNA, 15 bp, Homo sapiens
aaaggatgaaagaag

SEQ ID NO: 1906102 - DNA, 15 bp, Homo sapiens
aaggatgaaagaagc

SEQ ID NO: 1906103 - DNA, 15 bp, Homo sapiens
aggatgaaagaagct

SEQ ID NO: 1906104 - DNA, 15 bp, Homo sapiens
ggatgaaagaagctt

SEQ ID NO: 1906105 - DNA, 15 bp, Homo sapiens
gatgaaagaagcttt

SEQ ID NO: 1906106 - DNA, 15 bp, Homo sapiens
atgaaagaagctttt

SEQ ID NO: 1906107 - DNA, 15 bp, Homo sapiens
tgaaagaagcttttc

SEQ ID NO: 1906108 - DNA, 15 bp, Homo sapiens
gaaagaagcttttcc

SEQ ID NO: 1906109 - DNA, 15 bp, Homo sapiens
aaagaagcttttcct

SEQ ID NO: 1906110 - DNA, 15 bp, Homo sapiens
aagaagcttttcctt

SEQ ID NO: 1906111 - DNA, 15 bp, Homo sapiens
agaagcttttccttt

SEQ ID NO: 1906112 - DNA, 15 bp, Homo sapiens
gaagcttttcctttc

SEQ ID NO: 1906113 - DNA, 15 bp, Homo sapiens
aagcttttcctttct

SEQ ID NO: 1906114 - DNA, 15 bp, Homo sapiens
agcttttcctttctt

SEQ ID NO: 1906115 - DNA, 15 bp, Homo sapiens
gcttttcctttcttt

SEQ ID NO: 1906116 - DNA, 15 bp, Homo sapiens
tttcctttctttctc

SEQ ID NO: 1906117 - DNA, 15 bp, Homo sapiens
ttcctttctttctcg

SEQ ID NO: 1906118 - DNA, 15 bp, Homo sapiens
tcctttctttctcga

SEQ ID NO: 1906119 - DNA, 15 bp, Homo sapiens
cctttctttctcgaa

SEQ ID NO: 1906120 - DNA, 15 bp, Homo sapiens
ctttctttctcgaaa

SEQ ID NO: 1906121 - DNA, 15 bp, Homo sapiens
tttctttctcgaaag

SEQ ID NO: 1906122 - DNA, 15 bp, Homo sapiens
ttctttctcgaaagc

SEQ ID NO: 1906123 - DNA, 15 bp, Homo sapiens
tctttctcgaaagct

SEQ ID NO: 1906124 - DNA, 15 bp, Homo sapiens
ctttctcgaaagcta

SEQ ID NO: 1906125 - DNA, 15 bp, Homo sapiens
tttctcgaaagctag

SEQ ID NO: 1906126 - DNA, 15 bp, Homo sapiens
ttctcgaaagctaga

SEQ ID NO: 1906127 - DNA, 15 bp, Homo sapiens
tctcgaaagctagat

SEQ ID NO: 1906128 - DNA, 15 bp, Homo sapiens
ctcgaaagctagatt

SEQ ID NO: 1906129 - DNA, 15 bp, Homo sapiens
tcgaaagctagattg

SEQ ID NO: 1906130 - DNA, 15 bp, Homo sapiens
cgaaagctagattga

SEQ ID NO: 1906131 - DNA, 15 bp, Homo sapiens
gaaagctagattgaa

SEQ ID NO: 1906132 - DNA, 15 bp, Homo sapiens
aaagctagattgaat

SEQ ID NO: 1906133 - DNA, 15 bp, Homo sapiens
aagctagattgaatt

SEQ ID NO: 1906134 - DNA, 15 bp, Homo sapiens
agctagattgaattc

SEQ ID NO: 1906135 - DNA, 15 bp, Homo sapiens
gctagattgaattct

SEQ ID NO: 1906136 - DNA, 15 bp, Homo sapiens
ctagattgaattctg

SEQ ID NO: 1906137 - DNA, 15 bp, Homo sapiens
tagattgaattctga

SEQ ID NO: 1906138 - DNA, 15 bp, Homo sapiens
agattgaattctgat

SEQ ID NO: 1906139 - DNA, 15 bp, Homo sapiens
gattgaattctgatc

SEQ ID NO: 1906140 - DNA, 15 bp, Homo sapiens
attgaattctgatct

SEQ ID NO: 1906141 - DNA, 15 bp, Homo sapiens
ttgaattctgatctt

SEQ ID NO: 1906142 - DNA, 15 bp, Homo sapiens
tgaattctgatctta

SEQ ID NO: 1906143 - DNA, 15 bp, Homo sapiens
gaattctgatcttaa

SEQ ID NO: 1906144 - DNA, 15 bp, Homo sapiens
aattctgatcttaac

SEQ ID NO: 1906145 - DNA, 15 bp, Homo sapiens
attctgatcttaact

SEQ ID NO: 1906146 - DNA, 15 bp, Homo sapiens
ttctgatcttaactg

SEQ ID NO: 1906147 - DNA, 15 bp, Homo sapiens
tctgatcttaactgc

SEQ ID NO: 1906148 - DNA, 15 bp, Homo sapiens
ctgatcttaactgca

SEQ ID NO: 1906149 - DNA, 15 bp, Homo sapiens
tgatcttaactgcag

SEQ ID NO: 1906150 - DNA, 15 bp, Homo sapiens
gatcttaactgcagg

SEQ ID NO: 1906151 - DNA, 15 bp, Homo sapiens
atcttaactgcaggc

SEQ ID NO: 1906152 - DNA, 15 bp, Homo sapiens
tcttaactgcaggcc

SEQ ID NO: 1906153 - DNA, 15 bp, Homo sapiens
cttaactgcaggccc

SEQ ID NO: 1906154 - DNA, 15 bp, Homo sapiens
ttaactgcaggccca

SEQ ID NO: 1906155 - DNA, 15 bp, Homo sapiens
taactgcaggcccac

SEQ ID NO: 1906156 - DNA, 15 bp, Homo sapiens
aactgcaggcccaca

SEQ ID NO: 1906157 - DNA, 15 bp, Homo sapiens
actgcaggcccacag

SEQ ID NO: 1906158 - DNA, 15 bp, Homo sapiens
ctgcaggcccacaga

SEQ ID NO: 1906159 - DNA, 15 bp, Homo sapiens
tgcaggcccacagaa

SEQ ID NO: 1906160 - DNA, 15 bp, Homo sapiens
gcaggcccacagaat

SEQ ID NO: 1906161 - DNA, 15 bp, Homo sapiens
caggcccacagaatt

SEQ ID NO: 1906162 - DNA, 15 bp, Homo sapiens
aggcccacagaattg

SEQ ID NO: 1906163 - DNA, 15 bp, Homo sapiens
ggcccacagaattgg

SEQ ID NO: 1906164 - DNA, 15 bp, Homo sapiens
gcccacagaattggt

SEQ ID NO: 1906165 - DNA, 15 bp, Homo sapiens
cccacagaattggta

SEQ ID NO: 1906166 - DNA, 15 bp, Homo sapiens
ccacagaattggtac

SEQ ID NO: 1906167 - DNA, 15 bp, Homo sapiens
cacagaattggtact

SEQ ID NO: 1906168 - DNA, 15 bp, Homo sapiens
acagaattggtacta

SEQ ID NO: 1906169 - DNA, 15 bp, Homo sapiens
cagaattggtactat

SEQ ID NO: 1906170 - DNA, 15 bp, Homo sapiens
agaattggtactata

SEQ ID NO: 1906171 - DNA, 15 bp, Homo sapiens
gaattggtactatat

SEQ ID NO: 1906172 - DNA, 15 bp, Homo sapiens
aattggtactatatc

SEQ ID NO: 1906173 - DNA, 15 bp, Homo sapiens
attggtactatatct

SEQ ID NO: 1906174 - DNA, 15 bp, Homo sapiens
ttggtactatatctc

SEQ ID NO: 1906175 - DNA, 15 bp, Homo sapiens
tggtactatatctcc

SEQ ID NO: 1906176 - DNA, 15 bp, Homo sapiens
ggtactatatctcca

SEQ ID NO: 1906177 - DNA, 15 bp, Homo sapiens
gtactatatctccaa

SEQ ID NO: 1906178 - DNA, 15 bp, Homo sapiens
tactatatctccaac

SEQ ID NO: 1906179 - DNA, 15 bp, Homo sapiens
actatatctccaacg

SEQ ID NO: 1906180 - DNA, 15 bp, Homo sapiens
ctatatctccaacgt

SEQ ID NO: 1906181 - DNA, 15 bp, Homo sapiens
tatatctccaacgtg

SEQ ID NO: 1906182 - DNA, 15 bp, Homo sapiens
atatctccaacgtgg

SEQ ID NO: 1906183 - DNA, 15 bp, Homo sapiens
tatctccaacgtggg

SEQ ID NO: 1906184 - DNA, 15 bp, Homo sapiens
atctccaacgtgggg

SEQ ID NO: 1906185 - DNA, 15 bp, Homo sapiens
tctccaacgtgggga

SEQ ID NO: 1906186 - DNA, 15 bp, Homo sapiens
ctccaacgtggggac

SEQ ID NO: 1906187 - DNA, 15 bp, Homo sapiens
tccaacgtggggact

SEQ ID NO: 1906188 - DNA, 15 bp, Homo sapiens
ccaacgtggggactt

SEQ ID NO: 1906189 - DNA, 15 bp, Homo sapiens
caacgtggggacttt

SEQ ID NO: 1906190 - DNA, 15 bp, Homo sapiens
aacgtggggactttt

SEQ ID NO: 1906191 - DNA, 15 bp, Homo sapiens
acgtggggacttttc

SEQ ID NO: 1906192 - DNA, 15 bp, Homo sapiens
cgtggggacttttcc

SEQ ID NO: 1906193 - DNA, 15 bp, Homo sapiens
gtggggacttttcca

SEQ ID NO: 1906194 - DNA, 15 bp, Homo sapiens
tggggacttttccat

SEQ ID NO: 1906195 - DNA, 15 bp, Homo sapiens
ggggacttttccata

SEQ ID NO: 1906196 - DNA, 15 bp, Homo sapiens
gggacttttccatat

SEQ ID NO: 1906197 - DNA, 15 bp, Homo sapiens
ggacttttccatatt

SEQ ID NO: 1906198 - DNA, 15 bp, Homo sapiens
gacttttccatattc

SEQ ID NO: 1906199 - DNA, 15 bp, Homo sapiens
acttttccatattca

SEQ ID NO: 1906200 - DNA, 15 bp, Homo sapiens
cttttccatattcaa

SEQ ID NO: 1906201 - DNA, 15 bp, Homo sapiens
ttttccatattcaaa

SEQ ID NO: 1906202 - DNA, 15 bp, Homo sapiens
tttccatattcaaat

SEQ ID NO: 1906203 - DNA, 15 bp, Homo sapiens
ttccatattcaaatt

SEQ ID NO: 1906204 - DNA, 15 bp, Homo sapiens
tccatattcaaattt

SEQ ID NO: 1906205 - DNA, 15 bp, Homo sapiens
ccatattcaaattta

SEQ ID NO: 1906206 - DNA, 15 bp, Homo sapiens
catattcaaatttag

SEQ ID NO: 1906207 - DNA, 15 bp, Homo sapiens
atattcaaatttagc

SEQ ID NO: 1906208 - DNA, 15 bp, Homo sapiens
tattcaaatttagcc

SEQ ID NO: 1906209 - DNA, 15 bp, Homo sapiens
attcaaatttagccc

SEQ ID NO: 1906210 - DNA, 15 bp, Homo sapiens
ttcaaatttagccca

SEQ ID NO: 1906211 - DNA, 15 bp, Homo sapiens
tcaaatttagcccaa

SEQ ID NO: 1906212 - DNA, 15 bp, Homo sapiens
caaatttagcccaag

SEQ ID NO: 1906213 - DNA, 15 bp, Homo sapiens
aaatttagcccaaga

SEQ ID NO: 1906214 - DNA, 15 bp, Homo sapiens
aatttagcccaagaa

SEQ ID NO: 1906215 - DNA, 15 bp, Homo sapiens
atttagcccaagaat

SEQ ID NO: 1906216 - DNA, 15 bp, Homo sapiens
tttagcccaagaatt

SEQ ID NO: 1906217 - DNA, 15 bp, Homo sapiens
ttagcccaagaatta

SEQ ID NO: 1906218 - DNA, 15 bp, Homo sapiens
tagcccaagaattaa

SEQ ID NO: 1906219 - DNA, 15 bp, Homo sapiens
agcccaagaattaaa

SEQ ID NO: 1906220 - DNA, 15 bp, Homo sapiens
gcccaagaattaaag

SEQ ID NO: 1906221 - DNA, 15 bp, Homo sapiens
cccaagaattaaagt

SEQ ID NO: 1906222 - DNA, 15 bp, Homo sapiens
ccaagaattaaagtt

SEQ ID NO: 1906223 - DNA, 15 bp, Homo sapiens
caagaattaaagttt

SEQ ID NO: 1906224 - DNA, 15 bp, Homo sapiens
aagaattaaagtttt

SEQ ID NO: 1906225 - DNA, 15 bp, Homo sapiens
agaattaaagttttt

SEQ ID NO: 1906226 - DNA, 15 bp, Homo sapiens
gaattaaagttttta

SEQ ID NO: 1906227 - DNA, 15 bp, Homo sapiens
aattaaagtttttac

SEQ ID NO: 1906228 - DNA, 15 bp, Homo sapiens
attaaagtttttact

SEQ ID NO: 1906229 - DNA, 15 bp, Homo sapiens
ttaaagtttttactt

SEQ ID NO: 1906230 - DNA, 15 bp, Homo sapiens
taaagtttttacttt

SEQ ID NO: 1906231 - DNA, 15 bp, Homo sapiens
aaagtttttacttta

SEQ ID NO: 1906232 - DNA, 15 bp, Homo sapiens
aagtttttactttat

SEQ ID NO: 1906233 - DNA, 15 bp, Homo sapiens
agtttttactttatt

SEQ ID NO: 1906234 - DNA, 15 bp, Homo sapiens
gtttttactttattt

SEQ ID NO: 1906235 - DNA, 15 bp, Homo sapiens
tttttactttatttc

SEQ ID NO: 1906236 - DNA, 15 bp, Homo sapiens
ttttactttatttcg

SEQ ID NO: 1906237 - DNA, 15 bp, Homo sapiens
tttactttatttcgg

SEQ ID NO: 1906238 - DNA, 15 bp, Homo sapiens
ttactttatttcggc

SEQ ID NO: 1906239 - DNA, 15 bp, Homo sapiens
tactttatttcggcc

SEQ ID NO: 1906240 - DNA, 15 bp, Homo sapiens
actttatttcggcca

SEQ ID NO: 1906241 - DNA, 15 bp, Homo sapiens
ctttatttcggccag

SEQ ID NO: 1906242 - DNA, 15 bp, Homo sapiens
tttatttcggccagg

SEQ ID NO: 1906243 - DNA, 15 bp, Homo sapiens
ttatttcggccaggc

SEQ ID NO: 1906244 - DNA, 15 bp, Homo sapiens
tatttcggccaggcg

SEQ ID NO: 1906245 - DNA, 15 bp, Homo sapiens
atttcggccaggcgc

SEQ ID NO: 1906246 - DNA, 15 bp, Homo sapiens
tttcggccaggcgct

SEQ ID NO: 1906247 - DNA, 15 bp, Homo sapiens
ttcggccaggcgctg

SEQ ID NO: 1906248 - DNA, 15 bp, Homo sapiens
tcggccaggcgctgt

SEQ ID NO: 1906249 - DNA, 15 bp, Homo sapiens
cggccaggcgctgtg

SEQ ID NO: 1906250 - DNA, 15 bp, Homo sapiens
ggccaggcgctgtgg

SEQ ID NO: 1906251 - DNA, 15 bp, Homo sapiens
gccaggcgctgtggc

SEQ ID NO: 1906252 - DNA, 15 bp, Homo sapiens
ccaggcgctgtggct

SEQ ID NO: 1906253 - DNA, 15 bp, Homo sapiens
caggcgctgtggctc

SEQ ID NO: 1906254 - DNA, 15 bp, Homo sapiens
ggcgctgtggctcac

SEQ ID NO: 1906255 - DNA, 15 bp, Homo sapiens
gcgctgtggctcaca

SEQ ID NO: 1906256 - DNA, 15 bp, Homo sapiens
cgctgtggctcacac

SEQ ID NO: 1906257 - DNA, 15 bp, Homo sapiens
tgtggctcacacctg

SEQ ID NO: 1906258 - DNA, 15 bp, Homo sapiens
tttgggagaccaaga

SEQ ID NO: 1906259 - DNA, 15 bp, Homo sapiens
ttgggagaccaagat

SEQ ID NO: 1906260 - DNA, 15 bp, Homo sapiens
tgggagaccaagatg

SEQ ID NO: 1906261 - DNA, 15 bp, Homo sapiens
gggagaccaagatgg

SEQ ID NO: 1906262 - DNA, 15 bp, Homo sapiens
ggagaccaagatggg

SEQ ID NO: 1906263 - DNA, 15 bp, Homo sapiens
gagaccaagatgggc

SEQ ID NO: 1906264 - DNA, 15 bp, Homo sapiens
agaccaagatgggcg

SEQ ID NO: 1906265 - DNA, 15 bp, Homo sapiens
gaccaagatgggcgg

SEQ ID NO: 1906266 - DNA, 15 bp, Homo sapiens
accaagatgggcgga

SEQ ID NO: 1906267 - DNA, 15 bp, Homo sapiens
ccaagatgggcggat

SEQ ID NO: 1906268 - DNA, 15 bp, Homo sapiens
caagatgggcggatc

SEQ ID NO: 1906269 - DNA, 15 bp, Homo sapiens
aagatgggcggatca

SEQ ID NO: 1906270 - DNA, 15 bp, Homo sapiens
agatgggcggatcac

SEQ ID NO: 1906271 - DNA, 15 bp, Homo sapiens
gatgggcggatcact

SEQ ID NO: 1906272 - DNA, 15 bp, Homo sapiens
atgggcggatcactt

SEQ ID NO: 1906273 - DNA, 15 bp, Homo sapiens
aacatggtgaaaaca

SEQ ID NO: 1906274 - DNA, 15 bp, Homo sapiens
acatggtgaaaacac

SEQ ID NO: 1906275 - DNA, 15 bp, Homo sapiens
catggtgaaaacaca

SEQ ID NO: 1906276 - DNA, 15 bp, Homo sapiens
atggtgaaaacacat

SEQ ID NO: 1906277 - DNA, 15 bp, Homo sapiens
tggtgaaaacacatc

SEQ ID NO: 1906278 - DNA, 15 bp, Homo sapiens
ggtgaaaacacatct

SEQ ID NO: 1906279 - DNA, 15 bp, Homo sapiens
gtgaaaacacatctc

SEQ ID NO: 1906280 - DNA, 15 bp, Homo sapiens
tgaaaacacatctct

SEQ ID NO: 1906281 - DNA, 15 bp, Homo sapiens
gaaaacacatctcta

SEQ ID NO: 1906282 - DNA, 15 bp, Homo sapiens
aaaacacatctctac

SEQ ID NO: 1906283 - DNA, 15 bp, Homo sapiens
aaacacatctctact

SEQ ID NO: 1906284 - DNA, 15 bp, Homo sapiens
aacacatctctacta

SEQ ID NO: 1906285 - DNA, 15 bp, Homo sapiens
acacatctctactaa

SEQ ID NO: 1906286 - DNA, 15 bp, Homo sapiens
cacatctctactaaa

SEQ ID NO: 1906287 - DNA, 15 bp, Homo sapiens
acatctctactaaaa

SEQ ID NO: 1906288 - DNA, 15 bp, Homo sapiens
ctctactaaaaacat

SEQ ID NO: 1906289 - DNA, 15 bp, Homo sapiens
tctactaaaaacata

SEQ ID NO: 1906290 - DNA, 15 bp, Homo sapiens
ctactaaaaacataa

SEQ ID NO: 1906291 - DNA, 15 bp, Homo sapiens
tactaaaaacataaa

SEQ ID NO: 1906292 - DNA, 15 bp, Homo sapiens
actaaaaacataaaa

SEQ ID NO: 1906293 - DNA, 15 bp, Homo sapiens
ctaaaaacataaaaa

SEQ ID NO: 1906294 - DNA, 15 bp, Homo sapiens
taaaaacataaaaaa

SEQ ID NO: 1906295 - DNA, 15 bp, Homo sapiens
aaaaacataaaaaaa

SEQ ID NO: 1906296 - DNA, 15 bp, Homo sapiens
aaaacataaaaaaat

SEQ ID NO: 1906297 - DNA, 15 bp, Homo sapiens
aaacataaaaaaatt

SEQ ID NO: 1906298 - DNA, 15 bp, Homo sapiens
aacataaaaaaatta

SEQ ID NO: 1906299 - DNA, 15 bp, Homo sapiens
acataaaaaaattag

SEQ ID NO: 1906300 - DNA, 15 bp, Homo sapiens
cataaaaaaattagc

SEQ ID NO: 1906301 - DNA, 15 bp, Homo sapiens
gcgtggtggtgcgca

SEQ ID NO: 1906302 - DNA, 15 bp, Homo sapiens
cgtggtggtgcgcac

SEQ ID NO: 1906303 - DNA, 15 bp, Homo sapiens
gtggtggtgcgcacc

SEQ ID NO: 1906304 - DNA, 15 bp, Homo sapiens
tggtggtgcgcacct

SEQ ID NO: 1906305 - DNA, 15 bp, Homo sapiens
ggtggtgcgcacctg

SEQ ID NO: 1906306 - DNA, 15 bp, Homo sapiens
gtggtgcgcacctgt

SEQ ID NO: 1906307 - DNA, 15 bp, Homo sapiens
cccagctactctggg

SEQ ID NO: 1906308 - DNA, 15 bp, Homo sapiens
ccagctactctgggc

SEQ ID NO: 1906309 - DNA, 15 bp, Homo sapiens
cagctactctgggcg

SEQ ID NO: 1906310 - DNA, 15 bp, Homo sapiens
agctactctgggcgg

SEQ ID NO: 1906311 - DNA, 15 bp, Homo sapiens
gctactctgggcggc

SEQ ID NO: 1906312 - DNA, 15 bp, Homo sapiens
ctactctgggcggct

SEQ ID NO: 1906313 - DNA, 15 bp, Homo sapiens
tactctgggcggctg

SEQ ID NO: 1906314 - DNA, 15 bp, Homo sapiens
actctgggcggctga

SEQ ID NO: 1906315 - DNA, 15 bp, Homo sapiens
ctctgggcggctgag

SEQ ID NO: 1906316 - DNA, 15 bp, Homo sapiens
tctgggcggctgagg

SEQ ID NO: 1906317 - DNA, 15 bp, Homo sapiens
ctgggcggctgaggc

SEQ ID NO: 1906318 - DNA, 15 bp, Homo sapiens
tgggcggctgaggca

SEQ ID NO: 1906319 - DNA, 15 bp, Homo sapiens
gggcggctgaggcag

SEQ ID NO: 1906320 - DNA, 15 bp, Homo sapiens
ggcggctgaggcagg

SEQ ID NO: 1906321 - DNA, 15 bp, Homo sapiens
gcggctgaggcagga

SEQ ID NO: 1906322 - DNA, 15 bp, Homo sapiens
cggctgaggcaggag

SEQ ID NO: 1906323 - DNA, 15 bp, Homo sapiens
acttgaacctgggat

SEQ ID NO: 1906324 - DNA, 15 bp, Homo sapiens
cttgaacctgggata

SEQ ID NO: 1906325 - DNA, 15 bp, Homo sapiens
ttgaacctgggatat

SEQ ID NO: 1906326 - DNA, 15 bp, Homo sapiens
tgaacctgggatatg

SEQ ID NO: 1906327 - DNA, 15 bp, Homo sapiens
gaacctgggatatgg

SEQ ID NO: 1906328 - DNA, 15 bp, Homo sapiens
aacctgggatatgga

SEQ ID NO: 1906329 - DNA, 15 bp, Homo sapiens
acctgggatatggaa

SEQ ID NO: 1906330 - DNA, 15 bp, Homo sapiens
cctgggatatggaag

SEQ ID NO: 1906331 - DNA, 15 bp, Homo sapiens
ctgggatatggaagt

SEQ ID NO: 1906332 - DNA, 15 bp, Homo sapiens
tgggatatggaagtt

SEQ ID NO: 1906333 - DNA, 15 bp, Homo sapiens
gggatatggaagttg

SEQ ID NO: 1906334 - DNA, 15 bp, Homo sapiens
ggatatggaagttgc

SEQ ID NO: 1906335 - DNA, 15 bp, Homo sapiens
gatatggaagttgca

SEQ ID NO: 1906336 - DNA, 15 bp, Homo sapiens
atatggaagttgcag

SEQ ID NO: 1906337 - DNA, 15 bp, Homo sapiens
tatggaagttgcagt

SEQ ID NO: 1906338 - DNA, 15 bp, Homo sapiens
atggaagttgcagtg

SEQ ID NO: 1906339 - DNA, 15 bp, Homo sapiens
tggaagttgcagtga

SEQ ID NO: 1906340 - DNA, 15 bp, Homo sapiens
ggaagttgcagtgag

SEQ ID NO: 1906341 - DNA, 15 bp, Homo sapiens
aagttgcagtgagcg

SEQ ID NO: 1906342 - DNA, 15 bp, Homo sapiens
agttgcagtgagcgg

SEQ ID NO: 1906343 - DNA, 15 bp, Homo sapiens
agtgagcggagatct

SEQ ID NO: 1906344 - DNA, 15 bp, Homo sapiens
gtgagcggagatctt

SEQ ID NO: 1906345 - DNA, 15 bp, Homo sapiens
tgagcggagatctta

SEQ ID NO: 1906346 - DNA, 15 bp, Homo sapiens
gagcggagatcttac

SEQ ID NO: 1906347 - DNA, 15 bp, Homo sapiens
agcggagatcttact

SEQ ID NO: 1906348 - DNA, 15 bp, Homo sapiens
gcggagatcttacta

SEQ ID NO: 1906349 - DNA, 15 bp, Homo sapiens
cggagatcttactac

SEQ ID NO: 1906350 - DNA, 15 bp, Homo sapiens
ggagatcttactacc

SEQ ID NO: 1906351 - DNA, 15 bp, Homo sapiens
gagatcttactaccg

SEQ ID NO: 1906352 - DNA, 15 bp, Homo sapiens
agatcttactaccgc

SEQ ID NO: 1906353 - DNA, 15 bp, Homo sapiens
gatcttactaccgca

SEQ ID NO: 1906354 - DNA, 15 bp, Homo sapiens
atcttactaccgcac

SEQ ID NO: 1906355 - DNA, 15 bp, Homo sapiens
tcttactaccgcaca

SEQ ID NO: 1906356 - DNA, 15 bp, Homo sapiens
cttactaccgcacac

SEQ ID NO: 1906357 - DNA, 15 bp, Homo sapiens
ttactaccgcacacc

SEQ ID NO: 1906358 - DNA, 15 bp, Homo sapiens
tactaccgcacacca

SEQ ID NO: 1906359 - DNA, 15 bp, Homo sapiens
actaccgcacaccaa

SEQ ID NO: 1906360 - DNA, 15 bp, Homo sapiens
ctaccgcacaccaac

SEQ ID NO: 1906361 - DNA, 15 bp, Homo sapiens
taccgcacaccaacc

SEQ ID NO: 1906362 - DNA, 15 bp, Homo sapiens
accgcacaccaacca

SEQ ID NO: 1906363 - DNA, 15 bp, Homo sapiens
ccgcacaccaaccag

SEQ ID NO: 1906364 - DNA, 15 bp, Homo sapiens
cgcacaccaaccagc

SEQ ID NO: 1906365 - DNA, 15 bp, Homo sapiens
gcacaccaaccagcc

SEQ ID NO: 1906366 - DNA, 15 bp, Homo sapiens
cacaccaaccagcct

SEQ ID NO: 1906367 - DNA, 15 bp, Homo sapiens
acaccaaccagcctg

SEQ ID NO: 1906368 - DNA, 15 bp, Homo sapiens
caccaaccagcctgg

SEQ ID NO: 1906369 - DNA, 15 bp, Homo sapiens
accaaccagcctggg

SEQ ID NO: 1906370 - DNA, 15 bp, Homo sapiens
ccaaccagcctggga

SEQ ID NO: 1906371 - DNA, 15 bp, Homo sapiens
caaccagcctgggag

SEQ ID NO: 1906372 - DNA, 15 bp, Homo sapiens
aaccagcctgggaga

SEQ ID NO: 1906373 - DNA, 15 bp, Homo sapiens
accagcctgggagac

SEQ ID NO: 1906374 - DNA, 15 bp, Homo sapiens
ccatctcaaaaaaat

SEQ ID NO: 1906375 - DNA, 15 bp, Homo sapiens
aaataaaaataaaat

SEQ ID NO: 1906376 - DNA, 15 bp, Homo sapiens
aataaaaataaaata

SEQ ID NO: 1906377 - DNA, 15 bp, Homo sapiens
ataaaaataaaataa

SEQ ID NO: 1906378 - DNA, 15 bp, Homo sapiens
aaaaataaaataaag

SEQ ID NO: 1906379 - DNA, 15 bp, Homo sapiens
aaaataaaataaagt

SEQ ID NO: 1906380 - DNA, 15 bp, Homo sapiens
aaataaaataaagtt

SEQ ID NO: 1906381 - DNA, 15 bp, Homo sapiens
aataaaataaagttt

SEQ ID NO: 1906382 - DNA, 15 bp, Homo sapiens
ataaaataaagtttt

SEQ ID NO: 1906383 - DNA, 15 bp, Homo sapiens
taaaataaagttttt

SEQ ID NO: 1906384 - DNA, 15 bp, Homo sapiens
aaaataaagttttta

SEQ ID NO: 1906385 - DNA, 15 bp, Homo sapiens
aaataaagtttttac

SEQ ID NO: 1906386 - DNA, 15 bp, Homo sapiens
aataaagtttttact

SEQ ID NO: 1906387 - DNA, 15 bp, Homo sapiens
ataaagtttttactt

SEQ ID NO: 1906388 - DNA, 15 bp, Homo sapiens
tttttactttatttg

SEQ ID NO: 1906389 - DNA, 15 bp, Homo sapiens
ttttactttatttgg

SEQ ID NO: 1906390 - DNA, 15 bp, Homo sapiens
tttactttatttgga

SEQ ID NO: 1906391 - DNA, 15 bp, Homo sapiens
ttactttatttggag

SEQ ID NO: 1906392 - DNA, 15 bp, Homo sapiens
tactttatttggaga

SEQ ID NO: 1906393 - DNA, 15 bp, Homo sapiens
actttatttggagaa

SEQ ID NO: 1906394 - DNA, 15 bp, Homo sapiens
ctttatttggagaaa

SEQ ID NO: 1906395 - DNA, 15 bp, Homo sapiens
tttatttggagaaac

SEQ ID NO: 1906396 - DNA, 15 bp, Homo sapiens
ttatttggagaaact

SEQ ID NO: 1906397 - DNA, 15 bp, Homo sapiens
tatttggagaaactt

SEQ ID NO: 1906398 - DNA, 15 bp, Homo sapiens
atttggagaaacttt

SEQ ID NO: 1906399 - DNA, 15 bp, Homo sapiens
tttggagaaactttg

SEQ ID NO: 1906400 - DNA, 15 bp, Homo sapiens
ttggagaaactttgt

SEQ ID NO: 1906401 - DNA, 15 bp, Homo sapiens
tggagaaactttgtt

SEQ ID NO: 1906402 - DNA, 15 bp, Homo sapiens
ggagaaactttgttt

SEQ ID NO: 1906403 - DNA, 15 bp, Homo sapiens
gagaaactttgtttt

SEQ ID NO: 1906404 - DNA, 15 bp, Homo sapiens
agaaactttgtttta

SEQ ID NO: 1906405 - DNA, 15 bp, Homo sapiens
gaaactttgttttaa

SEQ ID NO: 1906406 - DNA, 15 bp, Homo sapiens
aaactttgttttaaa

SEQ ID NO: 1906407 - DNA, 15 bp, Homo sapiens
aactttgttttaaaa

SEQ ID NO: 1906408 - DNA, 15 bp, Homo sapiens
actttgttttaaaaa

SEQ ID NO: 1906409 - DNA, 15 bp, Homo sapiens
ctttgttttaaaaaa

SEQ ID NO: 1906410 - DNA, 15 bp, Homo sapiens
tttgttttaaaaaat

SEQ ID NO: 1906411 - DNA, 15 bp, Homo sapiens
ttgttttaaaaaatg

SEQ ID NO: 1906412 - DNA, 15 bp, Homo sapiens
tgttttaaaaaatgt

SEQ ID NO: 1906413 - DNA, 15 bp, Homo sapiens
gttttaaaaaatgta

SEQ ID NO: 1906414 - DNA, 15 bp, Homo sapiens
ttttaaaaaatgtat

SEQ ID NO: 1906415 - DNA, 15 bp, Homo sapiens
tttaaaaaatgtatt

SEQ ID NO: 1906416 - DNA, 15 bp, Homo sapiens
ttaaaaaatgtattt

SEQ ID NO: 1906417 - DNA, 15 bp, Homo sapiens
taaaaaatgtattta

SEQ ID NO: 1906418 - DNA, 15 bp, Homo sapiens
aaaaaatgtatttat

SEQ ID NO: 1906419 - DNA, 15 bp, Homo sapiens
aaaaatgtatttata

SEQ ID NO: 1906420 - DNA, 15 bp, Homo sapiens
aaaatgtatttatat

SEQ ID NO: 1906421 - DNA, 15 bp, Homo sapiens
aaatgtatttatatt

SEQ ID NO: 1906422 - DNA, 15 bp, Homo sapiens
aatgtatttatatta

SEQ ID NO: 1906423 - DNA, 15 bp, Homo sapiens
atgtatttatattat

SEQ ID NO: 1906424 - DNA, 15 bp, Homo sapiens
tgtatttatattatt

SEQ ID NO: 1906425 - DNA, 15 bp, Homo sapiens
gtatttatattatta

SEQ ID NO: 1906426 - DNA, 15 bp, Homo sapiens
tatttatattattat

SEQ ID NO: 1906427 - DNA, 15 bp, Homo sapiens
atttatattattata

SEQ ID NO: 1906428 - DNA, 15 bp, Homo sapiens
tttatattattatat

SEQ ID NO: 1906429 - DNA, 15 bp, Homo sapiens
ttatattattatatt

SEQ ID NO: 1906430 - DNA, 15 bp, Homo sapiens
tatattattatattt

SEQ ID NO: 1906431 - DNA, 15 bp, Homo sapiens
atattattatatttt

SEQ ID NO: 1906432 - DNA, 15 bp, Homo sapiens
tattattatatttta

SEQ ID NO: 1906433 - DNA, 15 bp, Homo sapiens
attattatattttaa

SEQ ID NO: 1906434 - DNA, 15 bp, Homo sapiens
ttattatattttaag

SEQ ID NO: 1906435 - DNA, 15 bp, Homo sapiens
tattatattttaagt

SEQ ID NO: 1906436 - DNA, 15 bp, Homo sapiens
attatattttaagta

SEQ ID NO: 1906437 - DNA, 15 bp, Homo sapiens
ttatattttaagtat

SEQ ID NO: 1906438 - DNA, 15 bp, Homo sapiens
tatattttaagtata

SEQ ID NO: 1906439 - DNA, 15 bp, Homo sapiens
atattttaagtatat

SEQ ID NO: 1906440 - DNA, 15 bp, Homo sapiens
tattttaagtatatt

SEQ ID NO: 1906441 - DNA, 15 bp, Homo sapiens
attttaagtatattt

SEQ ID NO: 1906442 - DNA, 15 bp, Homo sapiens
ttttaagtatatttt

SEQ ID NO: 1906443 - DNA, 15 bp, Homo sapiens
tttaagtatatttta

SEQ ID NO: 1906444 - DNA, 15 bp, Homo sapiens
ttaagtatattttac

SEQ ID NO: 1906445 - DNA, 15 bp, Homo sapiens
taagtatattttact

SEQ ID NO: 1906446 - DNA, 15 bp, Homo sapiens
aagtatattttactt

SEQ ID NO: 1906447 - DNA, 15 bp, Homo sapiens
agtatattttactta

SEQ ID NO: 1906448 - DNA, 15 bp, Homo sapiens
gtatattttacttaa

SEQ ID NO: 1906449 - DNA, 15 bp, Homo sapiens
tatattttacttaat

SEQ ID NO: 1906450 - DNA, 15 bp, Homo sapiens
atattttacttaata

SEQ ID NO: 1906451 - DNA, 15 bp, Homo sapiens
tattttacttaataa

SEQ ID NO: 1906452 - DNA, 15 bp, Homo sapiens
attttacttaataat

SEQ ID NO: 1906453 - DNA, 15 bp, Homo sapiens
ttttacttaataatt

SEQ ID NO: 1906454 - DNA, 15 bp, Homo sapiens
tttacttaataattc

SEQ ID NO: 1906455 - DNA, 15 bp, Homo sapiens
ttacttaataattca

SEQ ID NO: 1906456 - DNA, 15 bp, Homo sapiens
tacttaataattcaa

SEQ ID NO: 1906457 - DNA, 15 bp, Homo sapiens
acttaataattcaat

SEQ ID NO: 1906458 - DNA, 15 bp, Homo sapiens
cttaataattcaatt

SEQ ID NO: 1906459 - DNA, 15 bp, Homo sapiens
ttaataattcaatta

SEQ ID NO: 1906460 - DNA, 15 bp, Homo sapiens
taataattcaattaa

SEQ ID NO: 1906461 - DNA, 15 bp, Homo sapiens
aataattcaattaag

SEQ ID NO: 1906462 - DNA, 15 bp, Homo sapiens
ataattcaattaagg

SEQ ID NO: 1906463 - DNA, 15 bp, Homo sapiens
taattcaattaaggc

SEQ ID NO: 1906464 - DNA, 15 bp, Homo sapiens
aattcaattaaggct

SEQ ID NO: 1906465 - DNA, 15 bp, Homo sapiens
attcaattaaggctt

SEQ ID NO: 1906466 - DNA, 15 bp, Homo sapiens
ttcaattaaggcttt

SEQ ID NO: 1906467 - DNA, 15 bp, Homo sapiens
tcaattaaggctttt

SEQ ID NO: 1906468 - DNA, 15 bp, Homo sapiens
caattaaggcttttg

SEQ ID NO: 1906469 - DNA, 15 bp, Homo sapiens
aattaaggcttttgg

SEQ ID NO: 1906470 - DNA, 15 bp, Homo sapiens
attaaggcttttggt

SEQ ID NO: 1906471 - DNA, 15 bp, Homo sapiens
ttaaggcttttggtt

SEQ ID NO: 1906472 - DNA, 15 bp, Homo sapiens
taaggcttttggttt

SEQ ID NO: 1906473 - DNA, 15 bp, Homo sapiens
aaggcttttggttta

SEQ ID NO: 1906474 - DNA, 15 bp, Homo sapiens
aggcttttggtttaa

SEQ ID NO: 1906475 - DNA, 15 bp, Homo sapiens
ggcttttggtttaac

SEQ ID NO: 1906476 - DNA, 15 bp, Homo sapiens
gcttttggtttaact

SEQ ID NO: 1906477 - DNA, 15 bp, Homo sapiens
cttttggtttaactg

SEQ ID NO: 1906478 - DNA, 15 bp, Homo sapiens
ttttggtttaactgt

SEQ ID NO: 1906479 - DNA, 15 bp, Homo sapiens
tttggtttaactgta

SEQ ID NO: 1906480 - DNA, 15 bp, Homo sapiens
ttggtttaactgtat

SEQ ID NO: 1906481 - DNA, 15 bp, Homo sapiens
tggtttaactgtatt

SEQ ID NO: 1906482 - DNA, 15 bp, Homo sapiens
ggtttaactgtattt

SEQ ID NO: 1906483 - DNA, 15 bp, Homo sapiens
gtttaactgtattta

SEQ ID NO: 1906484 - DNA, 15 bp, Homo sapiens
tttaactgtatttaa

SEQ ID NO: 1906485 - DNA, 15 bp, Homo sapiens
ttaactgtatttaac

SEQ ID NO: 1906486 - DNA, 15 bp, Homo sapiens
taactgtatttaaca

SEQ ID NO: 1906487 - DNA, 15 bp, Homo sapiens
aactgtatttaacag

SEQ ID NO: 1906488 - DNA, 15 bp, Homo sapiens
actgtatttaacaga

SEQ ID NO: 1906489 - DNA, 15 bp, Homo sapiens
ctgtatttaacagat

SEQ ID NO: 1906490 - DNA, 15 bp, Homo sapiens
tgtatttaacagata

SEQ ID NO: 1906491 - DNA, 15 bp, Homo sapiens
gtatttaacagatag

SEQ ID NO: 1906492 - DNA, 15 bp, Homo sapiens
tatttaacagataga

SEQ ID NO: 1906493 - DNA, 15 bp, Homo sapiens
atttaacagatagac

SEQ ID NO: 1906494 - DNA, 15 bp, Homo sapiens
tttaacagatagaca

SEQ ID NO: 1906495 - DNA, 15 bp, Homo sapiens
ttaacagatagacaa

SEQ ID NO: 1906496 - DNA, 15 bp, Homo sapiens
taacagatagacaaa

SEQ ID NO: 1906497 - DNA, 15 bp, Homo sapiens
aacagatagacaaac

SEQ ID NO: 1906498 - DNA, 15 bp, Homo sapiens
acagatagacaaacc

SEQ ID NO: 1906499 - DNA, 15 bp, Homo sapiens
cagatagacaaacct

SEQ ID NO: 1906500 - DNA, 15 bp, Homo sapiens
agatagacaaacctt

SEQ ID NO: 1906501 - DNA, 15 bp, Homo sapiens
gatagacaaaccttt

SEQ ID NO: 1906502 - DNA, 15 bp, Homo sapiens
atagacaaacctttt

SEQ ID NO: 1906503 - DNA, 15 bp, Homo sapiens
tagacaaacctttta

SEQ ID NO: 1906504 - DNA, 15 bp, Homo sapiens
agacaaaccttttaa

SEQ ID NO: 1906505 - DNA, 15 bp, Homo sapiens
gacaaaccttttaat

SEQ ID NO: 1906506 - DNA, 15 bp, Homo sapiens
acaaaccttttaatt

SEQ ID NO: 1906507 - DNA, 15 bp, Homo sapiens
caaaccttttaattt

SEQ ID NO: 1906508 - DNA, 15 bp, Homo sapiens
aaaccttttaatttt

SEQ ID NO: 1906509 - DNA, 15 bp, Homo sapiens
aaccttttaatttta

SEQ ID NO: 1906510 - DNA, 15 bp, Homo sapiens
accttttaattttag

SEQ ID NO: 1906511 - DNA, 15 bp, Homo sapiens
ccttttaattttagt

SEQ ID NO: 1906512 - DNA, 15 bp, Homo sapiens
cttttaattttagtt

SEQ ID NO: 1906513 - DNA, 15 bp, Homo sapiens
ttttaattttagtta

SEQ ID NO: 1906514 - DNA, 15 bp, Homo sapiens
tttaattttagttat

SEQ ID NO: 1906515 - DNA, 15 bp, Homo sapiens
ttaattttagttatt

SEQ ID NO: 1906516 - DNA, 15 bp, Homo sapiens
taattttagttattt

SEQ ID NO: 1906517 - DNA, 15 bp, Homo sapiens
aattttagttatttt

SEQ ID NO: 1906518 - DNA, 15 bp, Homo sapiens
attttagttatttta

SEQ ID NO: 1906519 - DNA, 15 bp, Homo sapiens
ttttagttattttag

SEQ ID NO: 1906520 - DNA, 15 bp, Homo sapiens
tttagttattttagt

SEQ ID NO: 1906521 - DNA, 15 bp, Homo sapiens
ttagttattttagta

SEQ ID NO: 1906522 - DNA, 15 bp, Homo sapiens
tagttattttagtaa

SEQ ID NO: 1906523 - DNA, 15 bp, Homo sapiens
agttattttagtaat

SEQ ID NO: 1906524 - DNA, 15 bp, Homo sapiens
gttattttagtaatc

SEQ ID NO: 1906525 - DNA, 15 bp, Homo sapiens
ttattttagtaatct

SEQ ID NO: 1906526 - DNA, 15 bp, Homo sapiens
tattttagtaatcta

SEQ ID NO: 1906527 - DNA, 15 bp, Homo sapiens
attttagtaatctaa

SEQ ID NO: 1906528 - DNA, 15 bp, Homo sapiens
ttttagtaatctaaa

SEQ ID NO: 1906529 - DNA, 15 bp, Homo sapiens
tttagtaatctaaaa

SEQ ID NO: 1906530 - DNA, 15 bp, Homo sapiens
ttagtaatctaaaat

SEQ ID NO: 1906531 - DNA, 15 bp, Homo sapiens
tagtaatctaaaatg

SEQ ID NO: 1906532 - DNA, 15 bp, Homo sapiens
agtaatctaaaatga

SEQ ID NO: 1906533 - DNA, 15 bp, Homo sapiens
gtaatctaaaatgac

SEQ ID NO: 1906534 - DNA, 15 bp, Homo sapiens
taatctaaaatgaca

SEQ ID NO: 1906535 - DNA, 15 bp, Homo sapiens
aatctaaaatgacac

SEQ ID NO: 1906536 - DNA, 15 bp, Homo sapiens
atctaaaatgacaca

SEQ ID NO: 1906537 - DNA, 15 bp, Homo sapiens
tctaaaatgacacat

SEQ ID NO: 1906538 - DNA, 15 bp, Homo sapiens
ctaaaatgacacatg

SEQ ID NO: 1906539 - DNA, 15 bp, Homo sapiens
taaaatgacacatgc

SEQ ID NO: 1906540 - DNA, 15 bp, Homo sapiens
aaaatgacacatgcc

SEQ ID NO: 1906541 - DNA, 15 bp, Homo sapiens
aaatgacacatgccc

SEQ ID NO: 1906542 - DNA, 15 bp, Homo sapiens
aatgacacatgccct

SEQ ID NO: 1906543 - DNA, 15 bp, Homo sapiens
atgacacatgccctt

SEQ ID NO: 1906544 - DNA, 15 bp, Homo sapiens
tgacacatgcccttt

SEQ ID NO: 1906545 - DNA, 15 bp, Homo sapiens
gacacatgccctttt

SEQ ID NO: 1906546 - DNA, 15 bp, Homo sapiens
acacatgcccttttt

SEQ ID NO: 1906547 - DNA, 15 bp, Homo sapiens
cacatgcccttttta

SEQ ID NO: 1906548 - DNA, 15 bp, Homo sapiens
acatgccctttttaa

SEQ ID NO: 1906549 - DNA, 15 bp, Homo sapiens
catgccctttttaag

SEQ ID NO: 1906550 - DNA, 15 bp, Homo sapiens
atgccctttttaagg

SEQ ID NO: 1906551 - DNA, 15 bp, Homo sapiens
tgccctttttaaggg

SEQ ID NO: 1906552 - DNA, 15 bp, Homo sapiens
gccctttttaaggga

SEQ ID NO: 1906553 - DNA, 15 bp, Homo sapiens
ccctttttaagggaa

SEQ ID NO: 1906554 - DNA, 15 bp, Homo sapiens
cctttttaagggaaa

SEQ ID NO: 1906555 - DNA, 15 bp, Homo sapiens
ctttttaagggaaaa

SEQ ID NO: 1906556 - DNA, 15 bp, Homo sapiens
tttttaagggaaaaa

SEQ ID NO: 1906557 - DNA, 15 bp, Homo sapiens
ttttaagggaaaaaa

SEQ ID NO: 1906558 - DNA, 15 bp, Homo sapiens
tttaagggaaaaaat

SEQ ID NO: 1906559 - DNA, 15 bp, Homo sapiens
ttaagggaaaaaatt

SEQ ID NO: 1906560 - DNA, 15 bp, Homo sapiens
taagggaaaaaattc

SEQ ID NO: 1906561 - DNA, 15 bp, Homo sapiens
aagggaaaaaattca

SEQ ID NO: 1906562 - DNA, 15 bp, Homo sapiens
agggaaaaaattcaa

SEQ ID NO: 1906563 - DNA, 15 bp, Homo sapiens
gggaaaaaattcaaa

SEQ ID NO: 1906564 - DNA, 15 bp, Homo sapiens
ggaaaaaattcaaat

SEQ ID NO: 1906565 - DNA, 15 bp, Homo sapiens
gaaaaaattcaaata

SEQ ID NO: 1906566 - DNA, 15 bp, Homo sapiens
aaaaaattcaaatac

SEQ ID NO: 1906567 - DNA, 15 bp, Homo sapiens
aaaaattcaaataca

SEQ ID NO: 1906568 - DNA, 15 bp, Homo sapiens
aaaattcaaatacag

SEQ ID NO: 1906569 - DNA, 15 bp, Homo sapiens
aaattcaaatacaga

SEQ ID NO: 1906570 - DNA, 15 bp, Homo sapiens
aattcaaatacagaa

SEQ ID NO: 1906571 - DNA, 15 bp, Homo sapiens
attcaaatacagaaa

SEQ ID NO: 1906572 - DNA, 15 bp, Homo sapiens
ttcaaatacagaaaa

SEQ ID NO: 1906573 - DNA, 15 bp, Homo sapiens
tcaaatacagaaaat

SEQ ID NO: 1906574 - DNA, 15 bp, Homo sapiens
caaatacagaaaatt

SEQ ID NO: 1906575 - DNA, 15 bp, Homo sapiens
aaatacagaaaatta

SEQ ID NO: 1906576 - DNA, 15 bp, Homo sapiens
aatacagaaaattaa

SEQ ID NO: 1906577 - DNA, 15 bp, Homo sapiens
atacagaaaattaat

SEQ ID NO: 1906578 - DNA, 15 bp, Homo sapiens
tacagaaaattaatc

SEQ ID NO: 1906579 - DNA, 15 bp, Homo sapiens
acagaaaattaatca

SEQ ID NO: 1906580 - DNA, 15 bp, Homo sapiens
cagaaaattaatcaa

SEQ ID NO: 1906581 - DNA, 15 bp, Homo sapiens
agaaaattaatcaag

SEQ ID NO: 1906582 - DNA, 15 bp, Homo sapiens
gaaaattaatcaaga

SEQ ID NO: 1906583 - DNA, 15 bp, Homo sapiens
aaaattaatcaagag

SEQ ID NO: 1906584 - DNA, 15 bp, Homo sapiens
aaattaatcaagaga

SEQ ID NO: 1906585 - DNA, 15 bp, Homo sapiens
aattaatcaagagaa

SEQ ID NO: 1906586 - DNA, 15 bp, Homo sapiens
attaatcaagagaag

SEQ ID NO: 1906587 - DNA, 15 bp, Homo sapiens
ttaatcaagagaaga

SEQ ID NO: 1906588 - DNA, 15 bp, Homo sapiens
taatcaagagaagaa

SEQ ID NO: 1906589 - DNA, 15 bp, Homo sapiens
aatcaagagaagaaa

SEQ ID NO: 1906590 - DNA, 15 bp, Homo sapiens
atcaagagaagaaaa

SEQ ID NO: 1906591 - DNA, 15 bp, Homo sapiens
tcaagagaagaaaaa

SEQ ID NO: 1906592 - DNA, 15 bp, Homo sapiens
caagagaagaaaaaa

SEQ ID NO: 1906593 - DNA, 15 bp, Homo sapiens
aagagaagaaaaaat

SEQ ID NO: 1906594 - DNA, 15 bp, Homo sapiens
agagaagaaaaaatt

SEQ ID NO: 1906595 - DNA, 15 bp, Homo sapiens
gagaagaaaaaattt

SEQ ID NO: 1906596 - DNA, 15 bp, Homo sapiens
agaagaaaaaatttt

SEQ ID NO: 1906597 - DNA, 15 bp, Homo sapiens
gaagaaaaaattttt

SEQ ID NO: 1906598 - DNA, 15 bp, Homo sapiens
aagaaaaaattttta

SEQ ID NO: 1906599 - DNA, 15 bp, Homo sapiens
agaaaaaatttttaa

SEQ ID NO: 1906600 - DNA, 15 bp, Homo sapiens
gaaaaaatttttaaa

SEQ ID NO: 1906601 - DNA, 15 bp, Homo sapiens
aaaaatttttaaatg

SEQ ID NO: 1906602 - DNA, 15 bp, Homo sapiens
aaaatttttaaatga

SEQ ID NO: 1906603 - DNA, 15 bp, Homo sapiens
aaatttttaaatgaa

SEQ ID NO: 1906604 - DNA, 15 bp, Homo sapiens
aatttttaaatgaaa

SEQ ID NO: 1906605 - DNA, 15 bp, Homo sapiens
atttttaaatgaaat

SEQ ID NO: 1906606 - DNA, 15 bp, Homo sapiens
tttttaaatgaaatc

SEQ ID NO: 1906607 - DNA, 15 bp, Homo sapiens
ttttaaatgaaatca

SEQ ID NO: 1906608 - DNA, 15 bp, Homo sapiens
tttaaatgaaatcat

SEQ ID NO: 1906609 - DNA, 15 bp, Homo sapiens
ttaaatgaaatcatc

SEQ ID NO: 1906610 - DNA, 15 bp, Homo sapiens
taaatgaaatcatca

SEQ ID NO: 1906611 - DNA, 15 bp, Homo sapiens
aaatgaaatcatcag

SEQ ID NO: 1906612 - DNA, 15 bp, Homo sapiens
aatgaaatcatcagc

SEQ ID NO: 1906613 - DNA, 15 bp, Homo sapiens
atgaaatcatcagca

SEQ ID NO: 1906614 - DNA, 15 bp, Homo sapiens
tgaaatcatcagcag

SEQ ID NO: 1906615 - DNA, 15 bp, Homo sapiens
gaaatcatcagcagt

SEQ ID NO: 1906616 - DNA, 15 bp, Homo sapiens
aaatcatcagcagta

SEQ ID NO: 1906617 - DNA, 15 bp, Homo sapiens
aatcatcagcagtac

SEQ ID NO: 1906618 - DNA, 15 bp, Homo sapiens
atcatcagcagtact

SEQ ID NO: 1906619 - DNA, 15 bp, Homo sapiens
tcatcagcagtacta

SEQ ID NO: 1906620 - DNA, 15 bp, Homo sapiens
catcagcagtactag

SEQ ID NO: 1906621 - DNA, 15 bp, Homo sapiens
atcagcagtactagt

SEQ ID NO: 1906622 - DNA, 15 bp, Homo sapiens
tcagcagtactagta

SEQ ID NO: 1906623 - DNA, 15 bp, Homo sapiens
cagcagtactagtag

SEQ ID NO: 1906624 - DNA, 15 bp, Homo sapiens
agcagtactagtagt

SEQ ID NO: 1906625 - DNA, 15 bp, Homo sapiens
gcagtactagtagtt

SEQ ID NO: 1906626 - DNA, 15 bp, Homo sapiens
cagtactagtagtta

SEQ ID NO: 1906627 - DNA, 15 bp, Homo sapiens
agtactagtagttaa

SEQ ID NO: 1906628 - DNA, 15 bp, Homo sapiens
gtactagtagttaaa

SEQ ID NO: 1906629 - DNA, 15 bp, Homo sapiens
tactagtagttaaaa

SEQ ID NO: 1906630 - DNA, 15 bp, Homo sapiens
actagtagttaaaat

SEQ ID NO: 1906631 - DNA, 15 bp, Homo sapiens
ctagtagttaaaatt

SEQ ID NO: 1906632 - DNA, 15 bp, Homo sapiens
tagtagttaaaattt

SEQ ID NO: 1906633 - DNA, 15 bp, Homo sapiens
agtagttaaaattta

SEQ ID NO: 1906634 - DNA, 15 bp, Homo sapiens
gtagttaaaatttag

SEQ ID NO: 1906635 - DNA, 15 bp, Homo sapiens
tagttaaaatttagt

SEQ ID NO: 1906636 - DNA, 15 bp, Homo sapiens
agttaaaatttagtt

SEQ ID NO: 1906637 - DNA, 15 bp, Homo sapiens
gttaaaatttagttg

SEQ ID NO: 1906638 - DNA, 15 bp, Homo sapiens
ttaaaatttagttga

SEQ ID NO: 1906639 - DNA, 15 bp, Homo sapiens
taaaatttagttgat

SEQ ID NO: 1906640 - DNA, 15 bp, Homo sapiens
aaaatttagttgatg

SEQ ID NO: 1906641 - DNA, 15 bp, Homo sapiens
aaatttagttgatgc

SEQ ID NO: 1906642 - DNA, 15 bp, Homo sapiens
aatttagttgatgct

SEQ ID NO: 1906643 - DNA, 15 bp, Homo sapiens
atttagttgatgctc

SEQ ID NO: 1906644 - DNA, 15 bp, Homo sapiens
tttagttgatgctca

SEQ ID NO: 1906645 - DNA, 15 bp, Homo sapiens
ttagttgatgctcaa

SEQ ID NO: 1906646 - DNA, 15 bp, Homo sapiens
tagttgatgctcaat

SEQ ID NO: 1906647 - DNA, 15 bp, Homo sapiens
agttgatgctcaatc

SEQ ID NO: 1906648 - DNA, 15 bp, Homo sapiens
gttgatgctcaatct

SEQ ID NO: 1906649 - DNA, 15 bp, Homo sapiens
ttgatgctcaatcta

SEQ ID NO: 1906650 - DNA, 15 bp, Homo sapiens
tgatgctcaatctag

SEQ ID NO: 1906651 - DNA, 15 bp, Homo sapiens
gatgctcaatctaga

SEQ ID NO: 1906652 - DNA, 15 bp, Homo sapiens
atgctcaatctagac

SEQ ID NO: 1906653 - DNA, 15 bp, Homo sapiens
tgctcaatctagaca

SEQ ID NO: 1906654 - DNA, 15 bp, Homo sapiens
gctcaatctagacat

SEQ ID NO: 1906655 - DNA, 15 bp, Homo sapiens
ctcaatctagacatc

SEQ ID NO: 1906656 - DNA, 15 bp, Homo sapiens
tcaatctagacatct

SEQ ID NO: 1906657 - DNA, 15 bp, Homo sapiens
caatctagacatctg

SEQ ID NO: 1906658 - DNA, 15 bp, Homo sapiens
aatctagacatctgt

SEQ ID NO: 1906659 - DNA, 15 bp, Homo sapiens
atctagacatctgtc

SEQ ID NO: 1906660 - DNA, 15 bp, Homo sapiens
tctagacatctgtca

SEQ ID NO: 1906661 - DNA, 15 bp, Homo sapiens
ctagacatctgtcat

SEQ ID NO: 1906662 - DNA, 15 bp, Homo sapiens
tagacatctgtcatt

SEQ ID NO: 1906663 - DNA, 15 bp, Homo sapiens
agacatctgtcatta

SEQ ID NO: 1906664 - DNA, 15 bp, Homo sapiens
gacatctgtcattat

SEQ ID NO: 1906665 - DNA, 15 bp, Homo sapiens
acatctgtcattatg

SEQ ID NO: 1906666 - DNA, 15 bp, Homo sapiens
catctgtcattatgt

SEQ ID NO: 1906667 - DNA, 15 bp, Homo sapiens
atctgtcattatgta

SEQ ID NO: 1906668 - DNA, 15 bp, Homo sapiens
tctgtcattatgtat

SEQ ID NO: 1906669 - DNA, 15 bp, Homo sapiens
ctgtcattatgtata

SEQ ID NO: 1906670 - DNA, 15 bp, Homo sapiens
tgtcattatgtatat

SEQ ID NO: 1906671 - DNA, 15 bp, Homo sapiens
gtcattatgtatata

SEQ ID NO: 1906672 - DNA, 15 bp, Homo sapiens
tcattatgtatatac

SEQ ID NO: 1906673 - DNA, 15 bp, Homo sapiens
cattatgtatataca

SEQ ID NO: 1906674 - DNA, 15 bp, Homo sapiens
attatgtatatacac

SEQ ID NO: 1906675 - DNA, 15 bp, Homo sapiens
ttatgtatatacaca

SEQ ID NO: 1906676 - DNA, 15 bp, Homo sapiens
tatgtatatacacat

SEQ ID NO: 1906677 - DNA, 15 bp, Homo sapiens
atgtatatacacatt

SEQ ID NO: 1906678 - DNA, 15 bp, Homo sapiens
tgtatatacacatta

SEQ ID NO: 1906679 - DNA, 15 bp, Homo sapiens
gtatatacacattat

SEQ ID NO: 1906680 - DNA, 15 bp, Homo sapiens
tatatacacattatg

SEQ ID NO: 1906681 - DNA, 15 bp, Homo sapiens
atatacacattatgt

SEQ ID NO: 1906682 - DNA, 15 bp, Homo sapiens
tatacacattatgta

SEQ ID NO: 1906683 - DNA, 15 bp, Homo sapiens
atacacattatgtat

SEQ ID NO: 1906684 - DNA, 15 bp, Homo sapiens
tacacattatgtata

SEQ ID NO: 1906685 - DNA, 15 bp, Homo sapiens
acacattatgtatat

SEQ ID NO: 1906686 - DNA, 15 bp, Homo sapiens
cacattatgtatata

SEQ ID NO: 1906687 - DNA, 15 bp, Homo sapiens
acattatgtatatac

SEQ ID NO: 1906688 - DNA, 15 bp, Homo sapiens
atgtatatacacata

SEQ ID NO: 1906689 - DNA, 15 bp, Homo sapiens
tgtatatacacataa

SEQ ID NO: 1906690 - DNA, 15 bp, Homo sapiens
gtatatacacataaa

SEQ ID NO: 1906691 - DNA, 15 bp, Homo sapiens
tatatacacataaag

SEQ ID NO: 1906692 - DNA, 15 bp, Homo sapiens
atatacacataaaga

SEQ ID NO: 1906693 - DNA, 15 bp, Homo sapiens
tatacacataaagat

SEQ ID NO: 1906694 - DNA, 15 bp, Homo sapiens
atacacataaagata

SEQ ID NO: 1906695 - DNA, 15 bp, Homo sapiens
tacacataaagatag

SEQ ID NO: 1906696 - DNA, 15 bp, Homo sapiens
acacataaagataga

SEQ ID NO: 1906697 - DNA, 15 bp, Homo sapiens
cacataaagatagaa

SEQ ID NO: 1906698 - DNA, 15 bp, Homo sapiens
acataaagatagaaa

SEQ ID NO: 1906699 - DNA, 15 bp, Homo sapiens
cataaagatagaaat

SEQ ID NO: 1906700 - DNA, 15 bp, Homo sapiens
ataaagatagaaatt

SEQ ID NO: 1906701 - DNA, 15 bp, Homo sapiens
taaagatagaaattt

SEQ ID NO: 1906702 - DNA, 15 bp, Homo sapiens
aaagatagaaattta

SEQ ID NO: 1906703 - DNA, 15 bp, Homo sapiens
aagatagaaatttat

SEQ ID NO: 1906704 - DNA, 15 bp, Homo sapiens
agatagaaatttata

SEQ ID NO: 1906705 - DNA, 15 bp, Homo sapiens
gatagaaatttatac

SEQ ID NO: 1906706 - DNA, 15 bp, Homo sapiens
atagaaatttataca

SEQ ID NO: 1906707 - DNA, 15 bp, Homo sapiens
tagaaatttatacag

SEQ ID NO: 1906708 - DNA, 15 bp, Homo sapiens
agaaatttatacagt

SEQ ID NO: 1906709 - DNA, 15 bp, Homo sapiens
gaaatttatacagtt

SEQ ID NO: 1906710 - DNA, 15 bp, Homo sapiens
aaatttatacagttt

SEQ ID NO: 1906711 - DNA, 15 bp, Homo sapiens
aatttatacagttta

SEQ ID NO: 1906712 - DNA, 15 bp, Homo sapiens
atttatacagtttat

SEQ ID NO: 1906713 - DNA, 15 bp, Homo sapiens
tttatacagtttata

SEQ ID NO: 1906714 - DNA, 15 bp, Homo sapiens
ttatacagtttatat

SEQ ID NO: 1906715 - DNA, 15 bp, Homo sapiens
tatacagtttatatt

SEQ ID NO: 1906716 - DNA, 15 bp, Homo sapiens
atacagtttatatta

SEQ ID NO: 1906717 - DNA, 15 bp, Homo sapiens
tacagtttatattag

SEQ ID NO: 1906718 - DNA, 15 bp, Homo sapiens
acagtttatattagg

SEQ ID NO: 1906719 - DNA, 15 bp, Homo sapiens
cagtttatattagga

SEQ ID NO: 1906720 - DNA, 15 bp, Homo sapiens
agtttatattaggat

SEQ ID NO: 1906721 - DNA, 15 bp, Homo sapiens
gtttatattaggatc

SEQ ID NO: 1906722 - DNA, 15 bp, Homo sapiens
tttatattaggatca

SEQ ID NO: 1906723 - DNA, 15 bp, Homo sapiens
ttatattaggatcat

SEQ ID NO: 1906724 - DNA, 15 bp, Homo sapiens
tatattaggatcatt

SEQ ID NO: 1906725 - DNA, 15 bp, Homo sapiens
atattaggatcattt

SEQ ID NO: 1906726 - DNA, 15 bp, Homo sapiens
tattaggatcatttt

SEQ ID NO: 1906727 - DNA, 15 bp, Homo sapiens
attaggatcattttt

SEQ ID NO: 1906728 - DNA, 15 bp, Homo sapiens
ttaggatcatttttt

SEQ ID NO: 1906729 - DNA, 15 bp, Homo sapiens
taggatcattttttt

SEQ ID NO: 1906730 - DNA, 15 bp, Homo sapiens
aggatcatttttttt

SEQ ID NO: 1906731 - DNA, 15 bp, Homo sapiens
ggatcattttttttt

SEQ ID NO: 1906732 - DNA, 15 bp, Homo sapiens
gatcatttttttttc

SEQ ID NO: 1906733 - DNA, 15 bp, Homo sapiens
atcatttttttttct

SEQ ID NO: 1906734 - DNA, 15 bp, Homo sapiens
tcatttttttttctt

SEQ ID NO: 1906735 - DNA, 15 bp, Homo sapiens
catttttttttcttt

SEQ ID NO: 1906736 - DNA, 15 bp, Homo sapiens
tttttctttttttgg

SEQ ID NO: 1906737 - DNA, 15 bp, Homo sapiens
ttttctttttttgga

SEQ ID NO: 1906738 - DNA, 15 bp, Homo sapiens
tttctttttttggag

SEQ ID NO: 1906739 - DNA, 15 bp, Homo sapiens
ttctttttttggagt

SEQ ID NO: 1906740 - DNA, 15 bp, Homo sapiens
tctttttttggagtc

SEQ ID NO: 1906741 - DNA, 15 bp, Homo sapiens
ctttttttggagtca

SEQ ID NO: 1906742 - DNA, 15 bp, Homo sapiens
tttttttggagtcag

SEQ ID NO: 1906743 - DNA, 15 bp, Homo sapiens
ttttttggagtcagg

SEQ ID NO: 1906744 - DNA, 15 bp, Homo sapiens
tttttggagtcaggg

SEQ ID NO: 1906745 - DNA, 15 bp, Homo sapiens
ttttggagtcagggt

SEQ ID NO: 1906746 - DNA, 15 bp, Homo sapiens
tttggagtcagggtc

SEQ ID NO: 1906747 - DNA, 15 bp, Homo sapiens
ttggagtcagggtct

SEQ ID NO: 1906748 - DNA, 15 bp, Homo sapiens
tggagtcagggtctc

SEQ ID NO: 1906749 - DNA, 15 bp, Homo sapiens
ggagtcagggtctca

SEQ ID NO: 1906750 - DNA, 15 bp, Homo sapiens
gagtcagggtctcac

SEQ ID NO: 1906751 - DNA, 15 bp, Homo sapiens
agtcagggtctcact

SEQ ID NO: 1906752 - DNA, 15 bp, Homo sapiens
gtcagggtctcactg

SEQ ID NO: 1906753 - DNA, 15 bp, Homo sapiens
tcagggtctcactgt

SEQ ID NO: 1906754 - DNA, 15 bp, Homo sapiens
cagggtctcactgtg

SEQ ID NO: 1906755 - DNA, 15 bp, Homo sapiens
ggtctcactgtgtta

SEQ ID NO: 1906756 - DNA, 15 bp, Homo sapiens
gtctcactgtgttac

SEQ ID NO: 1906757 - DNA, 15 bp, Homo sapiens
tctcactgtgttacc

SEQ ID NO: 1906758 - DNA, 15 bp, Homo sapiens
ctcactgtgttaccc

SEQ ID NO: 1906759 - DNA, 15 bp, Homo sapiens
actgtgttacccagt

SEQ ID NO: 1906760 - DNA, 15 bp, Homo sapiens
ctgtgttacccagtc

SEQ ID NO: 1906761 - DNA, 15 bp, Homo sapiens
tgtgttacccagtct

SEQ ID NO: 1906762 - DNA, 15 bp, Homo sapiens
gtgttacccagtcta

SEQ ID NO: 1906763 - DNA, 15 bp, Homo sapiens
tgttacccagtctag

SEQ ID NO: 1906764 - DNA, 15 bp, Homo sapiens
gttacccagtctaga

SEQ ID NO: 1906765 - DNA, 15 bp, Homo sapiens
ttacccagtctagag

SEQ ID NO: 1906766 - DNA, 15 bp, Homo sapiens
tacccagtctagagt

SEQ ID NO: 1906767 - DNA, 15 bp, Homo sapiens
acccagtctagagta

SEQ ID NO: 1906768 - DNA, 15 bp, Homo sapiens
cccagtctagagtac

SEQ ID NO: 1906769 - DNA, 15 bp, Homo sapiens
ccagtctagagtaca

SEQ ID NO: 1906770 - DNA, 15 bp, Homo sapiens
cagtctagagtacag

SEQ ID NO: 1906771 - DNA, 15 bp, Homo sapiens
agtctagagtacagt

SEQ ID NO: 1906772 - DNA, 15 bp, Homo sapiens
gtctagagtacagtt

SEQ ID NO: 1906773 - DNA, 15 bp, Homo sapiens
tctagagtacagtta

SEQ ID NO: 1906774 - DNA, 15 bp, Homo sapiens
ctagagtacagttat

SEQ ID NO: 1906775 - DNA, 15 bp, Homo sapiens
tagagtacagttatg

SEQ ID NO: 1906776 - DNA, 15 bp, Homo sapiens
agagtacagttatgc

SEQ ID NO: 1906777 - DNA, 15 bp, Homo sapiens
gagtacagttatgca

SEQ ID NO: 1906778 - DNA, 15 bp, Homo sapiens
agtacagttatgcag

SEQ ID NO: 1906779 - DNA, 15 bp, Homo sapiens
gtacagttatgcagt

SEQ ID NO: 1906780 - DNA, 15 bp, Homo sapiens
tacagttatgcagtc

SEQ ID NO: 1906781 - DNA, 15 bp, Homo sapiens
acagttatgcagtca

SEQ ID NO: 1906782 - DNA, 15 bp, Homo sapiens
cagttatgcagtcat

SEQ ID NO: 1906783 - DNA, 15 bp, Homo sapiens
agttatgcagtcatg

SEQ ID NO: 1906784 - DNA, 15 bp, Homo sapiens
gttatgcagtcatgg

SEQ ID NO: 1906785 - DNA, 15 bp, Homo sapiens
ttatgcagtcatggc

SEQ ID NO: 1906786 - DNA, 15 bp, Homo sapiens
tatgcagtcatggct

SEQ ID NO: 1906787 - DNA, 15 bp, Homo sapiens
atgcagtcatggctc

SEQ ID NO: 1906788 - DNA, 15 bp, Homo sapiens
tgcagtcatggctca

SEQ ID NO: 1906789 - DNA, 15 bp, Homo sapiens
gcagtcatggctcac

SEQ ID NO: 1906790 - DNA, 15 bp, Homo sapiens
cagtcatggctcact

SEQ ID NO: 1906791 - DNA, 15 bp, Homo sapiens
agtcatggctcactg

SEQ ID NO: 1906792 - DNA, 15 bp, Homo sapiens
gtcatggctcactgg

SEQ ID NO: 1906793 - DNA, 15 bp, Homo sapiens
tcatggctcactgga

SEQ ID NO: 1906794 - DNA, 15 bp, Homo sapiens
catggctcactggag

SEQ ID NO: 1906795 - DNA, 15 bp, Homo sapiens
atggctcactggagc

SEQ ID NO: 1906796 - DNA, 15 bp, Homo sapiens
tggctcactggagcc

SEQ ID NO: 1906797 - DNA, 15 bp, Homo sapiens
ggctcactggagcct

SEQ ID NO: 1906798 - DNA, 15 bp, Homo sapiens
gctcactggagcctt

SEQ ID NO: 1906799 - DNA, 15 bp, Homo sapiens
ctcactggagccttg

SEQ ID NO: 1906800 - DNA, 15 bp, Homo sapiens
tcactggagccttga

SEQ ID NO: 1906801 - DNA, 15 bp, Homo sapiens
cactggagccttgac

SEQ ID NO: 1906802 - DNA, 15 bp, Homo sapiens
actggagccttgacc

SEQ ID NO: 1906803 - DNA, 15 bp, Homo sapiens
ctggagccttgacct

SEQ ID NO: 1906804 - DNA, 15 bp, Homo sapiens
tggagccttgacctc

SEQ ID NO: 1906805 - DNA, 15 bp, Homo sapiens
ggagccttgacctcc

SEQ ID NO: 1906806 - DNA, 15 bp, Homo sapiens
gagccttgacctcct

SEQ ID NO: 1906807 - DNA, 15 bp, Homo sapiens
gggctcaggcagtct

SEQ ID NO: 1906808 - DNA, 15 bp, Homo sapiens
ggctcaggcagtctt

SEQ ID NO: 1906809 - DNA, 15 bp, Homo sapiens
gctcaggcagtcttc

SEQ ID NO: 1906810 - DNA, 15 bp, Homo sapiens
ctcaggcagtcttcc

SEQ ID NO: 1906811 - DNA, 15 bp, Homo sapiens
tcaggcagtcttccc

SEQ ID NO: 1906812 - DNA, 15 bp, Homo sapiens
caggcagtcttccca

SEQ ID NO: 1906813 - DNA, 15 bp, Homo sapiens
aggcagtcttcccac

SEQ ID NO: 1906814 - DNA, 15 bp, Homo sapiens
ggcagtcttcccacc

SEQ ID NO: 1906815 - DNA, 15 bp, Homo sapiens
gcagtcttcccacct

SEQ ID NO: 1906816 - DNA, 15 bp, Homo sapiens
agtcttcccacctta

SEQ ID NO: 1906817 - DNA, 15 bp, Homo sapiens
gtcttcccaccttag

SEQ ID NO: 1906818 - DNA, 15 bp, Homo sapiens
tcttcccaccttagc

SEQ ID NO: 1906819 - DNA, 15 bp, Homo sapiens
cttcccaccttagcc

SEQ ID NO: 1906820 - DNA, 15 bp, Homo sapiens
ttcccaccttagcct

SEQ ID NO: 1906821 - DNA, 15 bp, Homo sapiens
tcccaccttagcctt

SEQ ID NO: 1906822 - DNA, 15 bp, Homo sapiens
cccaccttagccttc

SEQ ID NO: 1906823 - DNA, 15 bp, Homo sapiens
ccaccttagccttct

SEQ ID NO: 1906824 - DNA, 15 bp, Homo sapiens
caccttagccttctc

SEQ ID NO: 1906825 - DNA, 15 bp, Homo sapiens
accttagccttctca

SEQ ID NO: 1906826 - DNA, 15 bp, Homo sapiens
ccttagccttctcag

SEQ ID NO: 1906827 - DNA, 15 bp, Homo sapiens
cttagccttctcagt

SEQ ID NO: 1906828 - DNA, 15 bp, Homo sapiens
ttagccttctcagta

SEQ ID NO: 1906829 - DNA, 15 bp, Homo sapiens
tagccttctcagtag

SEQ ID NO: 1906830 - DNA, 15 bp, Homo sapiens
agccttctcagtagc

SEQ ID NO: 1906831 - DNA, 15 bp, Homo sapiens
gccttctcagtagct

SEQ ID NO: 1906832 - DNA, 15 bp, Homo sapiens
ccttctcagtagctg

SEQ ID NO: 1906833 - DNA, 15 bp, Homo sapiens
cttctcagtagctgg

SEQ ID NO: 1906834 - DNA, 15 bp, Homo sapiens
ttctcagtagctggg

SEQ ID NO: 1906835 - DNA, 15 bp, Homo sapiens
tctcagtagctggga

SEQ ID NO: 1906836 - DNA, 15 bp, Homo sapiens
ctcagtagctgggac

SEQ ID NO: 1906837 - DNA, 15 bp, Homo sapiens
tcagtagctgggact

SEQ ID NO: 1906838 - DNA, 15 bp, Homo sapiens
tgcaccaccacacct

SEQ ID NO: 1906839 - DNA, 15 bp, Homo sapiens
gcaccaccacacctg

SEQ ID NO: 1906840 - DNA, 15 bp, Homo sapiens
tggctaatttttaaa

SEQ ID NO: 1906841 - DNA, 15 bp, Homo sapiens
ggctaatttttaaat

SEQ ID NO: 1906842 - DNA, 15 bp, Homo sapiens
gctaatttttaaatt

SEQ ID NO: 1906843 - DNA, 15 bp, Homo sapiens
ctaatttttaaattt

SEQ ID NO: 1906844 - DNA, 15 bp, Homo sapiens
taatttttaaatttt

SEQ ID NO: 1906845 - DNA, 15 bp, Homo sapiens
aatttttaaattttt

SEQ ID NO: 1906846 - DNA, 15 bp, Homo sapiens
atttttaaatttttt

SEQ ID NO: 1906847 - DNA, 15 bp, Homo sapiens
tttttaaatttttta

SEQ ID NO: 1906848 - DNA, 15 bp, Homo sapiens
ttttaaattttttat

SEQ ID NO: 1906849 - DNA, 15 bp, Homo sapiens
tttaaattttttata

SEQ ID NO: 1906850 - DNA, 15 bp, Homo sapiens
ttaaattttttatag

SEQ ID NO: 1906851 - DNA, 15 bp, Homo sapiens
taaattttttataga

SEQ ID NO: 1906852 - DNA, 15 bp, Homo sapiens
aaattttttatagag

SEQ ID NO: 1906853 - DNA, 15 bp, Homo sapiens
aattttttatagaga

SEQ ID NO: 1906854 - DNA, 15 bp, Homo sapiens
attttttatagagac

SEQ ID NO: 1906855 - DNA, 15 bp, Homo sapiens
ttttttatagagaca

SEQ ID NO: 1906856 - DNA, 15 bp, Homo sapiens
tttttatagagacag

SEQ ID NO: 1906857 - DNA, 15 bp, Homo sapiens
ttttatagagacagg

SEQ ID NO: 1906858 - DNA, 15 bp, Homo sapiens
tttatagagacaggg

SEQ ID NO: 1906859 - DNA, 15 bp, Homo sapiens
ttatagagacagggt

SEQ ID NO: 1906860 - DNA, 15 bp, Homo sapiens
tatagagacagggtc

SEQ ID NO: 1906861 - DNA, 15 bp, Homo sapiens
atagagacagggtct

SEQ ID NO: 1906862 - DNA, 15 bp, Homo sapiens
gacagggtcttactt

SEQ ID NO: 1906863 - DNA, 15 bp, Homo sapiens
acagggtcttacttt

SEQ ID NO: 1906864 - DNA, 15 bp, Homo sapiens
cagggtcttactttg

SEQ ID NO: 1906865 - DNA, 15 bp, Homo sapiens
agggtcttactttgt

SEQ ID NO: 1906866 - DNA, 15 bp, Homo sapiens
gggtcttactttgtt

SEQ ID NO: 1906867 - DNA, 15 bp, Homo sapiens
ggtcttactttgttg

SEQ ID NO: 1906868 - DNA, 15 bp, Homo sapiens
gtcttactttgttgc

SEQ ID NO: 1906869 - DNA, 15 bp, Homo sapiens
tcttactttgttgcc

SEQ ID NO: 1906870 - DNA, 15 bp, Homo sapiens
cttactttgttgcct

SEQ ID NO: 1906871 - DNA, 15 bp, Homo sapiens
ttactttgttgcctg

SEQ ID NO: 1906872 - DNA, 15 bp, Homo sapiens
tactttgttgcctgg

SEQ ID NO: 1906873 - DNA, 15 bp, Homo sapiens
gggctggtctcaaat

SEQ ID NO: 1906874 - DNA, 15 bp, Homo sapiens
tctcaaattcctggg

SEQ ID NO: 1906875 - DNA, 15 bp, Homo sapiens
ctcaaattcctgggc

SEQ ID NO: 1906876 - DNA, 15 bp, Homo sapiens
tcaaattcctgggct

SEQ ID NO: 1906877 - DNA, 15 bp, Homo sapiens
caaattcctgggctc

SEQ ID NO: 1906878 - DNA, 15 bp, Homo sapiens
aaattcctgggctca

SEQ ID NO: 1906879 - DNA, 15 bp, Homo sapiens
ttcctgggctcaagg

SEQ ID NO: 1906880 - DNA, 15 bp, Homo sapiens
gggctcaagggatca

SEQ ID NO: 1906881 - DNA, 15 bp, Homo sapiens
ggctcaagggatcat

SEQ ID NO: 1906882 - DNA, 15 bp, Homo sapiens
gctcaagggatcatc

SEQ ID NO: 1906883 - DNA, 15 bp, Homo sapiens
ctcaagggatcatcc

SEQ ID NO: 1906884 - DNA, 15 bp, Homo sapiens
tcaagggatcatccc

SEQ ID NO: 1906885 - DNA, 15 bp, Homo sapiens
caagggatcatccca

SEQ ID NO: 1906886 - DNA, 15 bp, Homo sapiens
aagggatcatcccac

SEQ ID NO: 1906887 - DNA, 15 bp, Homo sapiens
agggatcatcccact

SEQ ID NO: 1906888 - DNA, 15 bp, Homo sapiens
gggatcatcccactt

SEQ ID NO: 1906889 - DNA, 15 bp, Homo sapiens
ggatcatcccacttc

SEQ ID NO: 1906890 - DNA, 15 bp, Homo sapiens
gatcatcccacttcg

SEQ ID NO: 1906891 - DNA, 15 bp, Homo sapiens
atcatcccacttcgg

SEQ ID NO: 1906892 - DNA, 15 bp, Homo sapiens
tcatcccacttcggc

SEQ ID NO: 1906893 - DNA, 15 bp, Homo sapiens
catcccacttcggcc

SEQ ID NO: 1906894 - DNA, 15 bp, Homo sapiens
atcccacttcggcct

SEQ ID NO: 1906895 - DNA, 15 bp, Homo sapiens
tcccacttcggcctc

SEQ ID NO: 1906896 - DNA, 15 bp, Homo sapiens
cccacttcggcctct

SEQ ID NO: 1906897 - DNA, 15 bp, Homo sapiens
ccacttcggcctctc

SEQ ID NO: 1906898 - DNA, 15 bp, Homo sapiens
cacttcggcctctca

SEQ ID NO: 1906899 - DNA, 15 bp, Homo sapiens
acttcggcctctcaa

SEQ ID NO: 1906900 - DNA, 15 bp, Homo sapiens
ttcggcctctcaaaa

SEQ ID NO: 1906901 - DNA, 15 bp, Homo sapiens
tcggcctctcaaaag

SEQ ID NO: 1906902 - DNA, 15 bp, Homo sapiens
cggcctctcaaaagc

SEQ ID NO: 1906903 - DNA, 15 bp, Homo sapiens
ggcctctcaaaagct

SEQ ID NO: 1906904 - DNA, 15 bp, Homo sapiens
gcctctcaaaagctc

SEQ ID NO: 1906905 - DNA, 15 bp, Homo sapiens
cctctcaaaagctct

SEQ ID NO: 1906906 - DNA, 15 bp, Homo sapiens
ctctcaaaagctctg

SEQ ID NO: 1906907 - DNA, 15 bp, Homo sapiens
tctcaaaagctctgg

SEQ ID NO: 1906908 - DNA, 15 bp, Homo sapiens
ctcaaaagctctgga

SEQ ID NO: 1906909 - DNA, 15 bp, Homo sapiens
tcaaaagctctggaa

SEQ ID NO: 1906910 - DNA, 15 bp, Homo sapiens
caaaagctctggaat

SEQ ID NO: 1906911 - DNA, 15 bp, Homo sapiens
aaaagctctggaatt

SEQ ID NO: 1906912 - DNA, 15 bp, Homo sapiens
aaagctctggaatta

SEQ ID NO: 1906913 - DNA, 15 bp, Homo sapiens
aagctctggaattat

SEQ ID NO: 1906914 - DNA, 15 bp, Homo sapiens
agctctggaattata

SEQ ID NO: 1906915 - DNA, 15 bp, Homo sapiens
gctctggaattatag

SEQ ID NO: 1906916 - DNA, 15 bp, Homo sapiens
ctctggaattataga

SEQ ID NO: 1906917 - DNA, 15 bp, Homo sapiens
tctggaattatagat

SEQ ID NO: 1906918 - DNA, 15 bp, Homo sapiens
ctggaattatagatg

SEQ ID NO: 1906919 - DNA, 15 bp, Homo sapiens
tggaattatagatgt

SEQ ID NO: 1906920 - DNA, 15 bp, Homo sapiens
ggaattatagatgtg

SEQ ID NO: 1906921 - DNA, 15 bp, Homo sapiens
gaattatagatgtga

SEQ ID NO: 1906922 - DNA, 15 bp, Homo sapiens
aattatagatgtgag

SEQ ID NO: 1906923 - DNA, 15 bp, Homo sapiens
attatagatgtgagc

SEQ ID NO: 1906924 - DNA, 15 bp, Homo sapiens
ttatagatgtgagct

SEQ ID NO: 1906925 - DNA, 15 bp, Homo sapiens
tatagatgtgagctg

SEQ ID NO: 1906926 - DNA, 15 bp, Homo sapiens
atagatgtgagctgc

SEQ ID NO: 1906927 - DNA, 15 bp, Homo sapiens
tagatgtgagctgcc

SEQ ID NO: 1906928 - DNA, 15 bp, Homo sapiens
agatgtgagctgccg

SEQ ID NO: 1906929 - DNA, 15 bp, Homo sapiens
gatgtgagctgccgt

SEQ ID NO: 1906930 - DNA, 15 bp, Homo sapiens
atgtgagctgccgtg

SEQ ID NO: 1906931 - DNA, 15 bp, Homo sapiens
tgtgagctgccgtgc

SEQ ID NO: 1906932 - DNA, 15 bp, Homo sapiens
gtgagctgccgtgcc

SEQ ID NO: 1906933 - DNA, 15 bp, Homo sapiens
tgagctgccgtgccc

SEQ ID NO: 1906934 - DNA, 15 bp, Homo sapiens
gagctgccgtgccca

SEQ ID NO: 1906935 - DNA, 15 bp, Homo sapiens
agctgccgtgcccag

SEQ ID NO: 1906936 - DNA, 15 bp, Homo sapiens
gctgccgtgcccagc

SEQ ID NO: 1906937 - DNA, 15 bp, Homo sapiens
ctgccgtgcccagcc

SEQ ID NO: 1906938 - DNA, 15 bp, Homo sapiens
tgccgtgcccagccc

SEQ ID NO: 1906939 - DNA, 15 bp, Homo sapiens
gccgtgcccagccca

SEQ ID NO: 1906940 - DNA, 15 bp, Homo sapiens
ccgtgcccagcccag

SEQ ID NO: 1906941 - DNA, 15 bp, Homo sapiens
cgtgcccagcccagg

SEQ ID NO: 1906942 - DNA, 15 bp, Homo sapiens
gtgcccagcccagga

SEQ ID NO: 1906943 - DNA, 15 bp, Homo sapiens
tgcccagcccaggat

SEQ ID NO: 1906944 - DNA, 15 bp, Homo sapiens
gcccagcccaggatc

SEQ ID NO: 1906945 - DNA, 15 bp, Homo sapiens
cccagcccaggatct

SEQ ID NO: 1906946 - DNA, 15 bp, Homo sapiens
ccagcccaggatctt

SEQ ID NO: 1906947 - DNA, 15 bp, Homo sapiens
cagcccaggatcttc

SEQ ID NO: 1906948 - DNA, 15 bp, Homo sapiens
agcccaggatcttcc

SEQ ID NO: 1906949 - DNA, 15 bp, Homo sapiens
gcccaggatcttcct

SEQ ID NO: 1906950 - DNA, 15 bp, Homo sapiens
cccaggatcttcctt

SEQ ID NO: 1906951 - DNA, 15 bp, Homo sapiens
ccaggatcttccttt

SEQ ID NO: 1906952 - DNA, 15 bp, Homo sapiens
caggatcttccttta

SEQ ID NO: 1906953 - DNA, 15 bp, Homo sapiens
aggatcttcctttat

SEQ ID NO: 1906954 - DNA, 15 bp, Homo sapiens
ggatcttcctttata

SEQ ID NO: 1906955 - DNA, 15 bp, Homo sapiens
gatcttcctttatat

SEQ ID NO: 1906956 - DNA, 15 bp, Homo sapiens
atcttcctttatatg

SEQ ID NO: 1906957 - DNA, 15 bp, Homo sapiens
tcttcctttatatgc

SEQ ID NO: 1906958 - DNA, 15 bp, Homo sapiens
cttcctttatatgct

SEQ ID NO: 1906959 - DNA, 15 bp, Homo sapiens
ttcctttatatgctt

SEQ ID NO: 1906960 - DNA, 15 bp, Homo sapiens
tcctttatatgcttt

SEQ ID NO: 1906961 - DNA, 15 bp, Homo sapiens
cctttatatgctttt

SEQ ID NO: 1906962 - DNA, 15 bp, Homo sapiens
ctttatatgcttttc

SEQ ID NO: 1906963 - DNA, 15 bp, Homo sapiens
tttatatgcttttct

SEQ ID NO: 1906964 - DNA, 15 bp, Homo sapiens
ttatatgcttttctg

SEQ ID NO: 1906965 - DNA, 15 bp, Homo sapiens
tatatgcttttctgt

SEQ ID NO: 1906966 - DNA, 15 bp, Homo sapiens
atatgcttttctgta

SEQ ID NO: 1906967 - DNA, 15 bp, Homo sapiens
tatgcttttctgtaa

SEQ ID NO: 1906968 - DNA, 15 bp, Homo sapiens
atgcttttctgtaat

SEQ ID NO: 1906969 - DNA, 15 bp, Homo sapiens
tgcttttctgtaatt

SEQ ID NO: 1906970 - DNA, 15 bp, Homo sapiens
gcttttctgtaattt

SEQ ID NO: 1906971 - DNA, 15 bp, Homo sapiens
cttttctgtaatttg

SEQ ID NO: 1906972 - DNA, 15 bp, Homo sapiens
ttttctgtaatttgc

SEQ ID NO: 1906973 - DNA, 15 bp, Homo sapiens
tttctgtaatttgca

SEQ ID NO: 1906974 - DNA, 15 bp, Homo sapiens
ttctgtaatttgcac

SEQ ID NO: 1906975 - DNA, 15 bp, Homo sapiens
tctgtaatttgcact

SEQ ID NO: 1906976 - DNA, 15 bp, Homo sapiens
ctgtaatttgcactt

SEQ ID NO: 1906977 - DNA, 15 bp, Homo sapiens
tgtaatttgcacttt

SEQ ID NO: 1906978 - DNA, 15 bp, Homo sapiens
gtaatttgcactttt

SEQ ID NO: 1906979 - DNA, 15 bp, Homo sapiens
taatttgcactttta

SEQ ID NO: 1906980 - DNA, 15 bp, Homo sapiens
aatttgcacttttac

SEQ ID NO: 1906981 - DNA, 15 bp, Homo sapiens
atttgcacttttacc

SEQ ID NO: 1906982 - DNA, 15 bp, Homo sapiens
tttgcacttttacct

SEQ ID NO: 1906983 - DNA, 15 bp, Homo sapiens
ttgcacttttacctt

SEQ ID NO: 1906984 - DNA, 15 bp, Homo sapiens
tgcacttttaccttc

SEQ ID NO: 1906985 - DNA, 15 bp, Homo sapiens
gcacttttaccttca

SEQ ID NO: 1906986 - DNA, 15 bp, Homo sapiens
cacttttaccttcat

SEQ ID NO: 1906987 - DNA, 15 bp, Homo sapiens
acttttaccttcatc

SEQ ID NO: 1906988 - DNA, 15 bp, Homo sapiens
cttttaccttcatcc

SEQ ID NO: 1906989 - DNA, 15 bp, Homo sapiens
ttttaccttcatcca

SEQ ID NO: 1906990 - DNA, 15 bp, Homo sapiens
tttaccttcatccag

SEQ ID NO: 1906991 - DNA, 15 bp, Homo sapiens
ttaccttcatccagc

SEQ ID NO: 1906992 - DNA, 15 bp, Homo sapiens
taccttcatccagca

SEQ ID NO: 1906993 - DNA, 15 bp, Homo sapiens
accttcatccagcat

SEQ ID NO: 1906994 - DNA, 15 bp, Homo sapiens
ccttcatccagcata

SEQ ID NO: 1906995 - DNA, 15 bp, Homo sapiens
cttcatccagcatat

SEQ ID NO: 1906996 - DNA, 15 bp, Homo sapiens
ttcatccagcatatc

SEQ ID NO: 1906997 - DNA, 15 bp, Homo sapiens
tcatccagcatatct

SEQ ID NO: 1906998 - DNA, 15 bp, Homo sapiens
catccagcatatctt

SEQ ID NO: 1906999 - DNA, 15 bp, Homo sapiens
atccagcatatctta

SEQ ID NO: 1907000 - DNA, 15 bp, Homo sapiens
tccagcatatcttac

SEQ ID NO: 1907001 - DNA, 15 bp, Homo sapiens
ccagcatatcttact

SEQ ID NO: 1907002 - DNA, 15 bp, Homo sapiens
cagcatatcttactg

SEQ ID NO: 1907003 - DNA, 15 bp, Homo sapiens
agcatatcttactgc

SEQ ID NO: 1907004 - DNA, 15 bp, Homo sapiens
gcatatcttactgca

SEQ ID NO: 1907005 - DNA, 15 bp, Homo sapiens
catatcttactgcaa

SEQ ID NO: 1907006 - DNA, 15 bp, Homo sapiens
atatcttactgcaac

SEQ ID NO: 1907007 - DNA, 15 bp, Homo sapiens
tatcttactgcaacc

SEQ ID NO: 1907008 - DNA, 15 bp, Homo sapiens
atcttactgcaaccc

SEQ ID NO: 1907009 - DNA, 15 bp, Homo sapiens
tcttactgcaaccct

SEQ ID NO: 1907010 - DNA, 15 bp, Homo sapiens
cttactgcaaccctt

SEQ ID NO: 1907011 - DNA, 15 bp, Homo sapiens
ttactgcaacccttc

SEQ ID NO: 1907012 - DNA, 15 bp, Homo sapiens
tactgcaacccttcc

SEQ ID NO: 1907013 - DNA, 15 bp, Homo sapiens
actgcaacccttcct

SEQ ID NO: 1907014 - DNA, 15 bp, Homo sapiens
ctgcaacccttcctg

SEQ ID NO: 1907015 - DNA, 15 bp, Homo sapiens
tgcaacccttcctgt

SEQ ID NO: 1907016 - DNA, 15 bp, Homo sapiens
gcaacccttcctgtg

SEQ ID NO: 1907017 - DNA, 15 bp, Homo sapiens
caacccttcctgtgc

SEQ ID NO: 1907018 - DNA, 15 bp, Homo sapiens
aacccttcctgtgca

SEQ ID NO: 1907019 - DNA, 15 bp, Homo sapiens
acccttcctgtgcaa

SEQ ID NO: 1907020 - DNA, 15 bp, Homo sapiens
cccttcctgtgcaag

SEQ ID NO: 1907021 - DNA, 15 bp, Homo sapiens
ccttcctgtgcaagg

SEQ ID NO: 1907022 - DNA, 15 bp, Homo sapiens
cttcctgtgcaaggc

SEQ ID NO: 1907023 - DNA, 15 bp, Homo sapiens
ttcctgtgcaaggcc

SEQ ID NO: 1907024 - DNA, 15 bp, Homo sapiens
tcctgtgcaaggccc

SEQ ID NO: 1907025 - DNA, 15 bp, Homo sapiens
cctgtgcaaggccct

SEQ ID NO: 1907026 - DNA, 15 bp, Homo sapiens
ctgtgcaaggcccta

SEQ ID NO: 1907027 - DNA, 15 bp, Homo sapiens
tgtgcaaggccctat

SEQ ID NO: 1907028 - DNA, 15 bp, Homo sapiens
gtgcaaggccctata

SEQ ID NO: 1907029 - DNA, 15 bp, Homo sapiens
tgcaaggccctatag

SEQ ID NO: 1907030 - DNA, 15 bp, Homo sapiens
gcaaggccctatagt

SEQ ID NO: 1907031 - DNA, 15 bp, Homo sapiens
caaggccctatagtg

SEQ ID NO: 1907032 - DNA, 15 bp, Homo sapiens
aaggccctatagtga

SEQ ID NO: 1907033 - DNA, 15 bp, Homo sapiens
aggccctatagtgag

SEQ ID NO: 1907034 - DNA, 15 bp, Homo sapiens
ggccctatagtgagc

SEQ ID NO: 1907035 - DNA, 15 bp, Homo sapiens
gccctatagtgagca

SEQ ID NO: 1907036 - DNA, 15 bp, Homo sapiens
ccctatagtgagcat

SEQ ID NO: 1907037 - DNA, 15 bp, Homo sapiens
cctatagtgagcatg

SEQ ID NO: 1907038 - DNA, 15 bp, Homo sapiens
ctatagtgagcatgt

SEQ ID NO: 1907039 - DNA, 15 bp, Homo sapiens
tatagtgagcatgtt

SEQ ID NO: 1907040 - DNA, 15 bp, Homo sapiens
atagtgagcatgttg

SEQ ID NO: 1907041 - DNA, 15 bp, Homo sapiens
tagtgagcatgttgc

SEQ ID NO: 1907042 - DNA, 15 bp, Homo sapiens
agtgagcatgttgca

SEQ ID NO: 1907043 - DNA, 15 bp, Homo sapiens
gtgagcatgttgcac

SEQ ID NO: 1907044 - DNA, 15 bp, Homo sapiens
tgagcatgttgcacc

SEQ ID NO: 1907045 - DNA, 15 bp, Homo sapiens
gagcatgttgcacca

SEQ ID NO: 1907046 - DNA, 15 bp, Homo sapiens
agcatgttgcaccag

SEQ ID NO: 1907047 - DNA, 15 bp, Homo sapiens
gcatgttgcaccagc

SEQ ID NO: 1907048 - DNA, 15 bp, Homo sapiens
catgttgcaccagct

SEQ ID NO: 1907049 - DNA, 15 bp, Homo sapiens
atgttgcaccagctt

SEQ ID NO: 1907050 - DNA, 15 bp, Homo sapiens
tgttgcaccagcttg

SEQ ID NO: 1907051 - DNA, 15 bp, Homo sapiens
gttgcaccagcttgc

SEQ ID NO: 1907052 - DNA, 15 bp, Homo sapiens
ttgcaccagcttgcc

SEQ ID NO: 1907053 - DNA, 15 bp, Homo sapiens
tgcaccagcttgcct

SEQ ID NO: 1907054 - DNA, 15 bp, Homo sapiens
gcaccagcttgcctt

SEQ ID NO: 1907055 - DNA, 15 bp, Homo sapiens
ccagcttgccttagg

SEQ ID NO: 1907056 - DNA, 15 bp, Homo sapiens
cagcttgccttagga

SEQ ID NO: 1907057 - DNA, 15 bp, Homo sapiens
agcttgccttaggag

SEQ ID NO: 1907058 - DNA, 15 bp, Homo sapiens
gcttgccttaggaga

SEQ ID NO: 1907059 - DNA, 15 bp, Homo sapiens
cttgccttaggagaa

SEQ ID NO: 1907060 - DNA, 15 bp, Homo sapiens
ttgccttaggagaaa

SEQ ID NO: 1907061 - DNA, 15 bp, Homo sapiens
tgccttaggagaaac

SEQ ID NO: 1907062 - DNA, 15 bp, Homo sapiens
gccttaggagaaact

SEQ ID NO: 1907063 - DNA, 15 bp, Homo sapiens
ccttaggagaaactt

SEQ ID NO: 1907064 - DNA, 15 bp, Homo sapiens
cttaggagaaacttg

SEQ ID NO: 1907065 - DNA, 15 bp, Homo sapiens
ttaggagaaacttga

SEQ ID NO: 1907066 - DNA, 15 bp, Homo sapiens
taggagaaacttgag

SEQ ID NO: 1907067 - DNA, 15 bp, Homo sapiens
aggagaaacttgaga

SEQ ID NO: 1907068 - DNA, 15 bp, Homo sapiens
ggagaaacttgagat

SEQ ID NO: 1907069 - DNA, 15 bp, Homo sapiens
gagaaacttgagata

SEQ ID NO: 1907070 - DNA, 15 bp, Homo sapiens
agaaacttgagatac

SEQ ID NO: 1907071 - DNA, 15 bp, Homo sapiens
gaaacttgagataca

SEQ ID NO: 1907072 - DNA, 15 bp, Homo sapiens
aaacttgagatacag

SEQ ID NO: 1907073 - DNA, 15 bp, Homo sapiens
aacttgagatacaga

SEQ ID NO: 1907074 - DNA, 15 bp, Homo sapiens
acttgagatacagag

SEQ ID NO: 1907075 - DNA, 15 bp, Homo sapiens
cttgagatacagagc

SEQ ID NO: 1907076 - DNA, 15 bp, Homo sapiens
ttgagatacagagcc

SEQ ID NO: 1907077 - DNA, 15 bp, Homo sapiens
tgagatacagagcct

SEQ ID NO: 1907078 - DNA, 15 bp, Homo sapiens
gagatacagagcctg

SEQ ID NO: 1907079 - DNA, 15 bp, Homo sapiens
agatacagagcctgc

SEQ ID NO: 1907080 - DNA, 15 bp, Homo sapiens
gatacagagcctgca

SEQ ID NO: 1907081 - DNA, 15 bp, Homo sapiens
atacagagcctgcac

SEQ ID NO: 1907082 - DNA, 15 bp, Homo sapiens
tacagagcctgcact

SEQ ID NO: 1907083 - DNA, 15 bp, Homo sapiens
acagagcctgcactg

SEQ ID NO: 1907084 - DNA, 15 bp, Homo sapiens
cagagcctgcactgg

SEQ ID NO: 1907085 - DNA, 15 bp, Homo sapiens
agagcctgcactgga

SEQ ID NO: 1907086 - DNA, 15 bp, Homo sapiens
gagcctgcactggaa

SEQ ID NO: 1907087 - DNA, 15 bp, Homo sapiens
agcctgcactggaaa

SEQ ID NO: 1907088 - DNA, 15 bp, Homo sapiens
gcctgcactggaaat

SEQ ID NO: 1907089 - DNA, 15 bp, Homo sapiens
cctgcactggaaatt

SEQ ID NO: 1907090 - DNA, 15 bp, Homo sapiens
ctgcactggaaattt

SEQ ID NO: 1907091 - DNA, 15 bp, Homo sapiens
tgcactggaaattta

SEQ ID NO: 1907092 - DNA, 15 bp, Homo sapiens
gcactggaaatttag

SEQ ID NO: 1907093 - DNA, 15 bp, Homo sapiens
cactggaaatttagc

SEQ ID NO: 1907094 - DNA, 15 bp, Homo sapiens
actggaaatttagcg

SEQ ID NO: 1907095 - DNA, 15 bp, Homo sapiens
ctggaaatttagcgc

SEQ ID NO: 1907096 - DNA, 15 bp, Homo sapiens
tggaaatttagcgca

SEQ ID NO: 1907097 - DNA, 15 bp, Homo sapiens
ggaaatttagcgcaa

SEQ ID NO: 1907098 - DNA, 15 bp, Homo sapiens
gaaatttagcgcaac

SEQ ID NO: 1907099 - DNA, 15 bp, Homo sapiens
aaatttagcgcaact

SEQ ID NO: 1907100 - DNA, 15 bp, Homo sapiens
aatttagcgcaactc

SEQ ID NO: 1907101 - DNA, 15 bp, Homo sapiens
atttagcgcaactct

SEQ ID NO: 1907102 - DNA, 15 bp, Homo sapiens
tttagcgcaactcta

SEQ ID NO: 1907103 - DNA, 15 bp, Homo sapiens
ttagcgcaactctac

SEQ ID NO: 1907104 - DNA, 15 bp, Homo sapiens
tagcgcaactctaca

SEQ ID NO: 1907105 - DNA, 15 bp, Homo sapiens
agcgcaactctacat

SEQ ID NO: 1907106 - DNA, 15 bp, Homo sapiens
gcgcaactctacatg

SEQ ID NO: 1907107 - DNA, 15 bp, Homo sapiens
cgcaactctacatga

SEQ ID NO: 1907108 - DNA, 15 bp, Homo sapiens
gcaactctacatgag

SEQ ID NO: 1907109 - DNA, 15 bp, Homo sapiens
caactctacatgaga

SEQ ID NO: 1907110 - DNA, 15 bp, Homo sapiens
aactctacatgagaa

SEQ ID NO: 1907111 - DNA, 15 bp, Homo sapiens
actctacatgagaat

SEQ ID NO: 1907112 - DNA, 15 bp, Homo sapiens
ctctacatgagaatg

SEQ ID NO: 1907113 - DNA, 15 bp, Homo sapiens
tctacatgagaatgc

SEQ ID NO: 1907114 - DNA, 15 bp, Homo sapiens
ctacatgagaatgcc

SEQ ID NO: 1907115 - DNA, 15 bp, Homo sapiens
tacatgagaatgcct

SEQ ID NO: 1907116 - DNA, 15 bp, Homo sapiens
acatgagaatgcctg

SEQ ID NO: 1907117 - DNA, 15 bp, Homo sapiens
catgagaatgcctgt

SEQ ID NO: 1907118 - DNA, 15 bp, Homo sapiens
atgagaatgcctgtc

SEQ ID NO: 1907119 - DNA, 15 bp, Homo sapiens
tgagaatgcctgtct

SEQ ID NO: 1907120 - DNA, 15 bp, Homo sapiens
gagaatgcctgtcta

SEQ ID NO: 1907121 - DNA, 15 bp, Homo sapiens
agaatgcctgtctat

SEQ ID NO: 1907122 - DNA, 15 bp, Homo sapiens
gaatgcctgtctatt

SEQ ID NO: 1907123 - DNA, 15 bp, Homo sapiens
aatgcctgtctattc

SEQ ID NO: 1907124 - DNA, 15 bp, Homo sapiens
atgcctgtctattca

SEQ ID NO: 1907125 - DNA, 15 bp, Homo sapiens
tgcctgtctattcat

SEQ ID NO: 1907126 - DNA, 15 bp, Homo sapiens
gcctgtctattcata

SEQ ID NO: 1907127 - DNA, 15 bp, Homo sapiens
cctgtctattcatat

SEQ ID NO: 1907128 - DNA, 15 bp, Homo sapiens
ctgtctattcatatc

SEQ ID NO: 1907129 - DNA, 15 bp, Homo sapiens
tgtctattcatatcc

SEQ ID NO: 1907130 - DNA, 15 bp, Homo sapiens
gtctattcatatcct

SEQ ID NO: 1907131 - DNA, 15 bp, Homo sapiens
tctattcatatcctc

SEQ ID NO: 1907132 - DNA, 15 bp, Homo sapiens
ctattcatatcctca

SEQ ID NO: 1907133 - DNA, 15 bp, Homo sapiens
tattcatatcctcac

SEQ ID NO: 1907134 - DNA, 15 bp, Homo sapiens
attcatatcctcact

SEQ ID NO: 1907135 - DNA, 15 bp, Homo sapiens
ttcatatcctcacta

SEQ ID NO: 1907136 - DNA, 15 bp, Homo sapiens
tcatatcctcactaa

SEQ ID NO: 1907137 - DNA, 15 bp, Homo sapiens
catatcctcactaac

SEQ ID NO: 1907138 - DNA, 15 bp, Homo sapiens
atatcctcactaacc

SEQ ID NO: 1907139 - DNA, 15 bp, Homo sapiens
tatcctcactaaccc

SEQ ID NO: 1907140 - DNA, 15 bp, Homo sapiens
atcctcactaaccct

SEQ ID NO: 1907141 - DNA, 15 bp, Homo sapiens
tcctcactaaccctg

SEQ ID NO: 1907142 - DNA, 15 bp, Homo sapiens
cctcactaaccctga

SEQ ID NO: 1907143 - DNA, 15 bp, Homo sapiens
ctcactaaccctgag

SEQ ID NO: 1907144 - DNA, 15 bp, Homo sapiens
tcactaaccctgagt

SEQ ID NO: 1907145 - DNA, 15 bp, Homo sapiens
cactaaccctgagtg

SEQ ID NO: 1907146 - DNA, 15 bp, Homo sapiens
actaaccctgagtgt

SEQ ID NO: 1907147 - DNA, 15 bp, Homo sapiens
ctaaccctgagtgtt

SEQ ID NO: 1907148 - DNA, 15 bp, Homo sapiens
taaccctgagtgttg

SEQ ID NO: 1907149 - DNA, 15 bp, Homo sapiens
aaccctgagtgttgt

SEQ ID NO: 1907150 - DNA, 15 bp, Homo sapiens
accctgagtgttgtt

SEQ ID NO: 1907151 - DNA, 15 bp, Homo sapiens
ccctgagtgttgtta

SEQ ID NO: 1907152 - DNA, 15 bp, Homo sapiens
cctgagtgttgttaa

SEQ ID NO: 1907153 - DNA, 15 bp, Homo sapiens
ctgagtgttgttaat

SEQ ID NO: 1907154 - DNA, 15 bp, Homo sapiens
tgagtgttgttaatt

SEQ ID NO: 1907155 - DNA, 15 bp, Homo sapiens
gagtgttgttaattt

SEQ ID NO: 1907156 - DNA, 15 bp, Homo sapiens
agtgttgttaattta

SEQ ID NO: 1907157 - DNA, 15 bp, Homo sapiens
gtgttgttaatttac

SEQ ID NO: 1907158 - DNA, 15 bp, Homo sapiens
tgttgttaatttact

SEQ ID NO: 1907159 - DNA, 15 bp, Homo sapiens
gttgttaatttactg

SEQ ID NO: 1907160 - DNA, 15 bp, Homo sapiens
ttgttaatttactga

SEQ ID NO: 1907161 - DNA, 15 bp, Homo sapiens
tgttaatttactgaa

SEQ ID NO: 1907162 - DNA, 15 bp, Homo sapiens
gttaatttactgaaa

SEQ ID NO: 1907163 - DNA, 15 bp, Homo sapiens
ttaatttactgaaag

SEQ ID NO: 1907164 - DNA, 15 bp, Homo sapiens
taatttactgaaagc

SEQ ID NO: 1907165 - DNA, 15 bp, Homo sapiens
aatttactgaaagca

SEQ ID NO: 1907166 - DNA, 15 bp, Homo sapiens
atttactgaaagcag

SEQ ID NO: 1907167 - DNA, 15 bp, Homo sapiens
tttactgaaagcagt

SEQ ID NO: 1907168 - DNA, 15 bp, Homo sapiens
ttactgaaagcagtt

SEQ ID NO: 1907169 - DNA, 15 bp, Homo sapiens
tactgaaagcagttt

SEQ ID NO: 1907170 - DNA, 15 bp, Homo sapiens
actgaaagcagtttt

SEQ ID NO: 1907171 - DNA, 15 bp, Homo sapiens
ctgaaagcagtttta

SEQ ID NO: 1907172 - DNA, 15 bp, Homo sapiens
tgaaagcagttttaa

SEQ ID NO: 1907173 - DNA, 15 bp, Homo sapiens
gaaagcagttttaaa

SEQ ID NO: 1907174 - DNA, 15 bp, Homo sapiens
aaagcagttttaaat

SEQ ID NO: 1907175 - DNA, 15 bp, Homo sapiens
aagcagttttaaatg

SEQ ID NO: 1907176 - DNA, 15 bp, Homo sapiens
agcagttttaaatgc

SEQ ID NO: 1907177 - DNA, 15 bp, Homo sapiens
gcagttttaaatgct

SEQ ID NO: 1907178 - DNA, 15 bp, Homo sapiens
cagttttaaatgctt

SEQ ID NO: 1907179 - DNA, 15 bp, Homo sapiens
agttttaaatgcttc

SEQ ID NO: 1907180 - DNA, 15 bp, Homo sapiens
gttttaaatgcttcc

SEQ ID NO: 1907181 - DNA, 15 bp, Homo sapiens
ttttaaatgcttcct

SEQ ID NO: 1907182 - DNA, 15 bp, Homo sapiens
tttaaatgcttcctg

SEQ ID NO: 1907183 - DNA, 15 bp, Homo sapiens
ttaaatgcttcctga

SEQ ID NO: 1907184 - DNA, 15 bp, Homo sapiens
taaatgcttcctgac

SEQ ID NO: 1907185 - DNA, 15 bp, Homo sapiens
aaatgcttcctgacc

SEQ ID NO: 1907186 - DNA, 15 bp, Homo sapiens
aatgcttcctgacca

SEQ ID NO: 1907187 - DNA, 15 bp, Homo sapiens
atgcttcctgaccag

SEQ ID NO: 1907188 - DNA, 15 bp, Homo sapiens
tgcttcctgaccagg

SEQ ID NO: 1907189 - DNA, 15 bp, Homo sapiens
gcttcctgaccaggg

SEQ ID NO: 1907190 - DNA, 15 bp, Homo sapiens
cttcctgaccaggga

SEQ ID NO: 1907191 - DNA, 15 bp, Homo sapiens
ttcctgaccagggaa

SEQ ID NO: 1907192 - DNA, 15 bp, Homo sapiens
tcctgaccagggaac

SEQ ID NO: 1907193 - DNA, 15 bp, Homo sapiens
cctgaccagggaacg

SEQ ID NO: 1907194 - DNA, 15 bp, Homo sapiens
ctgaccagggaacga

SEQ ID NO: 1907195 - DNA, 15 bp, Homo sapiens
tgaccagggaacgaa

SEQ ID NO: 1907196 - DNA, 15 bp, Homo sapiens
gaccagggaacgaag

SEQ ID NO: 1907197 - DNA, 15 bp, Homo sapiens
accagggaacgaaga

SEQ ID NO: 1907198 - DNA, 15 bp, Homo sapiens
ccagggaacgaagaa

SEQ ID NO: 1907199 - DNA, 15 bp, Homo sapiens
cagggaacgaagaag

SEQ ID NO: 1907200 - DNA, 15 bp, Homo sapiens
agggaacgaagaagc

SEQ ID NO: 1907201 - DNA, 15 bp, Homo sapiens
gggaacgaagaagct

SEQ ID NO: 1907202 - DNA, 15 bp, Homo sapiens
ggaacgaagaagctt

SEQ ID NO: 1907203 - DNA, 15 bp, Homo sapiens
gaacgaagaagctta

SEQ ID NO: 1907204 - DNA, 15 bp, Homo sapiens
aacgaagaagcttaa

SEQ ID NO: 1907205 - DNA, 15 bp, Homo sapiens
acgaagaagcttaag

SEQ ID NO: 1907206 - DNA, 15 bp, Homo sapiens
cgaagaagcttaagt

SEQ ID NO: 1907207 - DNA, 15 bp, Homo sapiens
gaagaagcttaagtt

SEQ ID NO: 1907208 - DNA, 15 bp, Homo sapiens
aagaagcttaagttc

SEQ ID NO: 1907209 - DNA, 15 bp, Homo sapiens
agaagcttaagttct

SEQ ID NO: 1907210 - DNA, 15 bp, Homo sapiens
gaagcttaagttctg

SEQ ID NO: 1907211 - DNA, 15 bp, Homo sapiens
aagcttaagttctgg

SEQ ID NO: 1907212 - DNA, 15 bp, Homo sapiens
agcttaagttctggg

SEQ ID NO: 1907213 - DNA, 15 bp, Homo sapiens
gcttaagttctggga

SEQ ID NO: 1907214 - DNA, 15 bp, Homo sapiens
cttaagttctgggaa

SEQ ID NO: 1907215 - DNA, 15 bp, Homo sapiens
ttaagttctgggaat

SEQ ID NO: 1907216 - DNA, 15 bp, Homo sapiens
taagttctgggaatg

SEQ ID NO: 1907217 - DNA, 15 bp, Homo sapiens
aagttctgggaatgg

SEQ ID NO: 1907218 - DNA, 15 bp, Homo sapiens
agttctgggaatggg

SEQ ID NO: 1907219 - DNA, 15 bp, Homo sapiens
gttctgggaatggga

SEQ ID NO: 1907220 - DNA, 15 bp, Homo sapiens
ttctgggaatgggag

SEQ ID NO: 1907221 - DNA, 15 bp, Homo sapiens
tctgggaatgggagg

SEQ ID NO: 1907222 - DNA, 15 bp, Homo sapiens
ctgggaatgggagga

SEQ ID NO: 1907223 - DNA, 15 bp, Homo sapiens
tgggaatgggaggat

SEQ ID NO: 1907224 - DNA, 15 bp, Homo sapiens
gggaatgggaggata

SEQ ID NO: 1907225 - DNA, 15 bp, Homo sapiens
ggaatgggaggatag

SEQ ID NO: 1907226 - DNA, 15 bp, Homo sapiens
gaatgggaggataga

SEQ ID NO: 1907227 - DNA, 15 bp, Homo sapiens
aatgggaggatagaa

SEQ ID NO: 1907228 - DNA, 15 bp, Homo sapiens
atgggaggatagaag

SEQ ID NO: 1907229 - DNA, 15 bp, Homo sapiens
tgggaggatagaagt

SEQ ID NO: 1907230 - DNA, 15 bp, Homo sapiens
gggaggatagaagtg

SEQ ID NO: 1907231 - DNA, 15 bp, Homo sapiens
ggaggatagaagtgc

SEQ ID NO: 1907232 - DNA, 15 bp, Homo sapiens
gaggatagaagtgcc

SEQ ID NO: 1907233 - DNA, 15 bp, Homo sapiens
aggatagaagtgcca

SEQ ID NO: 1907234 - DNA, 15 bp, Homo sapiens
ggatagaagtgccag

SEQ ID NO: 1907235 - DNA, 15 bp, Homo sapiens
gatagaagtgccaga

SEQ ID NO: 1907236 - DNA, 15 bp, Homo sapiens
atagaagtgccagaa

SEQ ID NO: 1907237 - DNA, 15 bp, Homo sapiens
tagaagtgccagaaa

SEQ ID NO: 1907238 - DNA, 15 bp, Homo sapiens
agaagtgccagaaaa

SEQ ID NO: 1907239 - DNA, 15 bp, Homo sapiens
gaagtgccagaaaag

SEQ ID NO: 1907240 - DNA, 15 bp, Homo sapiens
aagtgccagaaaaga

SEQ ID NO: 1907241 - DNA, 15 bp, Homo sapiens
agtgccagaaaagag

SEQ ID NO: 1907242 - DNA, 15 bp, Homo sapiens
gtgccagaaaagagc

SEQ ID NO: 1907243 - DNA, 15 bp, Homo sapiens
tgccagaaaagagct

SEQ ID NO: 1907244 - DNA, 15 bp, Homo sapiens
gccagaaaagagctc

SEQ ID NO: 1907245 - DNA, 15 bp, Homo sapiens
ccagaaaagagctca

SEQ ID NO: 1907246 - DNA, 15 bp, Homo sapiens
cagaaaagagctcag

SEQ ID NO: 1907247 - DNA, 15 bp, Homo sapiens
agaaaagagctcagg

SEQ ID NO: 1907248 - DNA, 15 bp, Homo sapiens
gaaaagagctcagga

SEQ ID NO: 1907249 - DNA, 15 bp, Homo sapiens
aaaagagctcaggag

SEQ ID NO: 1907250 - DNA, 15 bp, Homo sapiens
aaagagctcaggagt

SEQ ID NO: 1907251 - DNA, 15 bp, Homo sapiens
aagagctcaggagtt

SEQ ID NO: 1907252 - DNA, 15 bp, Homo sapiens
agagctcaggagttc

SEQ ID NO: 1907253 - DNA, 15 bp, Homo sapiens
gagctcaggagttca

SEQ ID NO: 1907254 - DNA, 15 bp, Homo sapiens
agctcaggagttcag

SEQ ID NO: 1907255 - DNA, 15 bp, Homo sapiens
gctcaggagttcaga

SEQ ID NO: 1907256 - DNA, 15 bp, Homo sapiens
ctcaggagttcagaa

SEQ ID NO: 1907257 - DNA, 15 bp, Homo sapiens
tcaggagttcagaaa

SEQ ID NO: 1907258 - DNA, 15 bp, Homo sapiens
caggagttcagaaat

SEQ ID NO: 1907259 - DNA, 15 bp, Homo sapiens
aggagttcagaaatc

SEQ ID NO: 1907260 - DNA, 15 bp, Homo sapiens
ggagttcagaaatcc

SEQ ID NO: 1907261 - DNA, 15 bp, Homo sapiens
gagttcagaaatccc

SEQ ID NO: 1907262 - DNA, 15 bp, Homo sapiens
agttcagaaatccct

SEQ ID NO: 1907263 - DNA, 15 bp, Homo sapiens
gttcagaaatccctg

SEQ ID NO: 1907264 - DNA, 15 bp, Homo sapiens
ttcagaaatccctgc

SEQ ID NO: 1907265 - DNA, 15 bp, Homo sapiens
tcagaaatccctgca

SEQ ID NO: 1907266 - DNA, 15 bp, Homo sapiens
cagaaatccctgcag

SEQ ID NO: 1907267 - DNA, 15 bp, Homo sapiens
agaaatccctgcagc

SEQ ID NO: 1907268 - DNA, 15 bp, Homo sapiens
gaaatccctgcagcg

SEQ ID NO: 1907269 - DNA, 15 bp, Homo sapiens
aaatccctgcagcgg

SEQ ID NO: 1907270 - DNA, 15 bp, Homo sapiens
aatccctgcagcggt

SEQ ID NO: 1907271 - DNA, 15 bp, Homo sapiens
atccctgcagcggtc

SEQ ID NO: 1907272 - DNA, 15 bp, Homo sapiens
tccctgcagcggtcc

SEQ ID NO: 1907273 - DNA, 15 bp, Homo sapiens
ccctgcagcggtccc

SEQ ID NO: 1907274 - DNA, 15 bp, Homo sapiens
cctgcagcggtcccc

SEQ ID NO: 1907275 - DNA, 15 bp, Homo sapiens
ctgcagcggtccccc

SEQ ID NO: 1907276 - DNA, 15 bp, Homo sapiens
tgcagcggtccccct

SEQ ID NO: 1907277 - DNA, 15 bp, Homo sapiens
gcagcggtccccctc

SEQ ID NO: 1907278 - DNA, 15 bp, Homo sapiens
cagcggtccccctcc

SEQ ID NO: 1907279 - DNA, 15 bp, Homo sapiens
agcggtccccctccc

SEQ ID NO: 1907280 - DNA, 15 bp, Homo sapiens
gcggtccccctccct

SEQ ID NO: 1907281 - DNA, 15 bp, Homo sapiens
cggtccccctccctc

SEQ ID NO: 1907282 - DNA, 15 bp, Homo sapiens
ggtccccctccctct

SEQ ID NO: 1907283 - DNA, 15 bp, Homo sapiens
gtccccctccctctc

SEQ ID NO: 1907284 - DNA, 15 bp, Homo sapiens
tccccctccctctcc

SEQ ID NO: 1907285 - DNA, 15 bp, Homo sapiens
ccccctccctctcct

SEQ ID NO: 1907286 - DNA, 15 bp, Homo sapiens
cccctccctctcctt

SEQ ID NO: 1907287 - DNA, 15 bp, Homo sapiens
ccctccctctccttt

SEQ ID NO: 1907288 - DNA, 15 bp, Homo sapiens
cctccctctcctttc

SEQ ID NO: 1907289 - DNA, 15 bp, Homo sapiens
ctccctctcctttca

SEQ ID NO: 1907290 - DNA, 15 bp, Homo sapiens
tccctctcctttcac

SEQ ID NO: 1907291 - DNA, 15 bp, Homo sapiens
ccctctcctttcact

SEQ ID NO: 1907292 - DNA, 15 bp, Homo sapiens
cctctcctttcactt

SEQ ID NO: 1907293 - DNA, 15 bp, Homo sapiens
ctctcctttcacttt

SEQ ID NO: 1907294 - DNA, 15 bp, Homo sapiens
tctcctttcactttc

SEQ ID NO: 1907295 - DNA, 15 bp, Homo sapiens
ctcctttcactttct

SEQ ID NO: 1907296 - DNA, 15 bp, Homo sapiens
tcctttcactttctg

SEQ ID NO: 1907297 - DNA, 15 bp, Homo sapiens
cctttcactttctgt

SEQ ID NO: 1907298 - DNA, 15 bp, Homo sapiens
ctttcactttctgtc

SEQ ID NO: 1907299 - DNA, 15 bp, Homo sapiens
tttcactttctgtct

SEQ ID NO: 1907300 - DNA, 15 bp, Homo sapiens
ttcactttctgtctt

SEQ ID NO: 1907301 - DNA, 15 bp, Homo sapiens
tcactttctgtcttt

SEQ ID NO: 1907302 - DNA, 15 bp, Homo sapiens
cactttctgtctttc

SEQ ID NO: 1907303 - DNA, 15 bp, Homo sapiens
actttctgtctttct

SEQ ID NO: 1907304 - DNA, 15 bp, Homo sapiens
ctttctgtctttctg

SEQ ID NO: 1907305 - DNA, 15 bp, Homo sapiens
tttctgtctttctgg

SEQ ID NO: 1907306 - DNA, 15 bp, Homo sapiens
ttctgtctttctggt

SEQ ID NO: 1907307 - DNA, 15 bp, Homo sapiens
tctgtctttctggtc

SEQ ID NO: 1907308 - DNA, 15 bp, Homo sapiens
ctgtctttctggtct

SEQ ID NO: 1907309 - DNA, 15 bp, Homo sapiens
tgtctttctggtctt

SEQ ID NO: 1907310 - DNA, 15 bp, Homo sapiens
gtctttctggtcttt

SEQ ID NO: 1907311 - DNA, 15 bp, Homo sapiens
tctttctggtctttt

SEQ ID NO: 1907312 - DNA, 15 bp, Homo sapiens
ctttctggtcttttg

SEQ ID NO: 1907313 - DNA, 15 bp, Homo sapiens
tttctggtcttttgg

SEQ ID NO: 1907314 - DNA, 15 bp, Homo sapiens
ttctggtcttttggt

SEQ ID NO: 1907315 - DNA, 15 bp, Homo sapiens
tctggtcttttggtc

SEQ ID NO: 1907316 - DNA, 15 bp, Homo sapiens
ctggtcttttggtct

SEQ ID NO: 1907317 - DNA, 15 bp, Homo sapiens
tggtcttttggtctt

SEQ ID NO: 1907318 - DNA, 15 bp, Homo sapiens
ggtcttttggtcttt

SEQ ID NO: 1907319 - DNA, 15 bp, Homo sapiens
gtcttttggtctttg

SEQ ID NO: 1907320 - DNA, 15 bp, Homo sapiens
tcttttggtctttgt

SEQ ID NO: 1907321 - DNA, 15 bp, Homo sapiens
cttttggtctttgtt

SEQ ID NO: 1907322 - DNA, 15 bp, Homo sapiens
ttttggtctttgtta

SEQ ID NO: 1907323 - DNA, 15 bp, Homo sapiens
tttggtctttgttac

SEQ ID NO: 1907324 - DNA, 15 bp, Homo sapiens
ttggtctttgttaca

SEQ ID NO: 1907325 - DNA, 15 bp, Homo sapiens
tggtctttgttacac

SEQ ID NO: 1907326 - DNA, 15 bp, Homo sapiens
ggtctttgttacact

SEQ ID NO: 1907327 - DNA, 15 bp, Homo sapiens
gtctttgttacacta

SEQ ID NO: 1907328 - DNA, 15 bp, Homo sapiens
tctttgttacactag

SEQ ID NO: 1907329 - DNA, 15 bp, Homo sapiens
ctttgttacactagt

SEQ ID NO: 1907330 - DNA, 15 bp, Homo sapiens
tttgttacactagtg

SEQ ID NO: 1907331 - DNA, 15 bp, Homo sapiens
ttgttacactagtga

SEQ ID NO: 1907332 - DNA, 15 bp, Homo sapiens
tgttacactagtgat

SEQ ID NO: 1907333 - DNA, 15 bp, Homo sapiens
gttacactagtgata

SEQ ID NO: 1907334 - DNA, 15 bp, Homo sapiens
ttacactagtgataa

SEQ ID NO: 1907335 - DNA, 15 bp, Homo sapiens
tacactagtgataaa

SEQ ID NO: 1907336 - DNA, 15 bp, Homo sapiens
acactagtgataaac

SEQ ID NO: 1907337 - DNA, 15 bp, Homo sapiens
cactagtgataaacc

SEQ ID NO: 1907338 - DNA, 15 bp, Homo sapiens
actagtgataaacca

SEQ ID NO: 1907339 - DNA, 15 bp, Homo sapiens
ctagtgataaaccat

SEQ ID NO: 1907340 - DNA, 15 bp, Homo sapiens
tagtgataaaccatc

SEQ ID NO: 1907341 - DNA, 15 bp, Homo sapiens
agtgataaaccatca

SEQ ID NO: 1907342 - DNA, 15 bp, Homo sapiens
gtgataaaccatcaa

SEQ ID NO: 1907343 - DNA, 15 bp, Homo sapiens
tgataaaccatcaaa

SEQ ID NO: 1907344 - DNA, 15 bp, Homo sapiens
gataaaccatcaaag

SEQ ID NO: 1907345 - DNA, 15 bp, Homo sapiens
ataaaccatcaaaga

SEQ ID NO: 1907346 - DNA, 15 bp, Homo sapiens
taaaccatcaaagaa

SEQ ID NO: 1907347 - DNA, 15 bp, Homo sapiens
aaaccatcaaagaat

SEQ ID NO: 1907348 - DNA, 15 bp, Homo sapiens
aaccatcaaagaatg

SEQ ID NO: 1907349 - DNA, 15 bp, Homo sapiens
accatcaaagaatga

SEQ ID NO: 1907350 - DNA, 15 bp, Homo sapiens
ccatcaaagaatgat

SEQ ID NO: 1907351 - DNA, 15 bp, Homo sapiens
catcaaagaatgatg

SEQ ID NO: 1907352 - DNA, 15 bp, Homo sapiens
atcaaagaatgatgg

SEQ ID NO: 1907353 - DNA, 15 bp, Homo sapiens
tcaaagaatgatgga

SEQ ID NO: 1907354 - DNA, 15 bp, Homo sapiens
caaagaatgatggaa

SEQ ID NO: 1907355 - DNA, 15 bp, Homo sapiens
aaagaatgatggaat

SEQ ID NO: 1907356 - DNA, 15 bp, Homo sapiens
aagaatgatggaatg

SEQ ID NO: 1907357 - DNA, 15 bp, Homo sapiens
agaatgatggaatga

SEQ ID NO: 1907358 - DNA, 15 bp, Homo sapiens
gaatgatggaatgat

SEQ ID NO: 1907359 - DNA, 15 bp, Homo sapiens
aatgatggaatgatg

SEQ ID NO: 1907360 - DNA, 15 bp, Homo sapiens
atgatggaatgatgc

SEQ ID NO: 1907361 - DNA, 15 bp, Homo sapiens
tgatggaatgatgct

SEQ ID NO: 1907362 - DNA, 15 bp, Homo sapiens
gatggaatgatgcta

SEQ ID NO: 1907363 - DNA, 15 bp, Homo sapiens
atggaatgatgctaa

SEQ ID NO: 1907364 - DNA, 15 bp, Homo sapiens
tggaatgatgctaac

SEQ ID NO: 1907365 - DNA, 15 bp, Homo sapiens
ggaatgatgctaact

SEQ ID NO: 1907366 - DNA, 15 bp, Homo sapiens
gaatgatgctaactt

SEQ ID NO: 1907367 - DNA, 15 bp, Homo sapiens
aatgatgctaacttc

SEQ ID NO: 1907368 - DNA, 15 bp, Homo sapiens
atgatgctaacttct

SEQ ID NO: 1907369 - DNA, 15 bp, Homo sapiens
tgatgctaacttctc

SEQ ID NO: 1907370 - DNA, 15 bp, Homo sapiens
gatgctaacttctct

SEQ ID NO: 1907371 - DNA, 15 bp, Homo sapiens
atgctaacttctctc

SEQ ID NO: 1907372 - DNA, 15 bp, Homo sapiens
tgctaacttctctct

SEQ ID NO: 1907373 - DNA, 15 bp, Homo sapiens
gctaacttctctctt

SEQ ID NO: 1907374 - DNA, 15 bp, Homo sapiens
ctaacttctctcttt

SEQ ID NO: 1907375 - DNA, 15 bp, Homo sapiens
taacttctctctttt

SEQ ID NO: 1907376 - DNA, 15 bp, Homo sapiens
aacttctctcttttt

SEQ ID NO: 1907377 - DNA, 15 bp, Homo sapiens
acttctctctttttt

SEQ ID NO: 1907378 - DNA, 15 bp, Homo sapiens
cttctctcttttttt

SEQ ID NO: 1907379 - DNA, 15 bp, Homo sapiens
ttctctcttttttta

SEQ ID NO: 1907380 - DNA, 15 bp, Homo sapiens
ctctctttttttaat

SEQ ID NO: 1907381 - DNA, 15 bp, Homo sapiens
tctctttttttaatt

SEQ ID NO: 1907382 - DNA, 15 bp, Homo sapiens
ctctttttttaattt

SEQ ID NO: 1907383 - DNA, 15 bp, Homo sapiens
tctttttttaatttt

SEQ ID NO: 1907384 - DNA, 15 bp, Homo sapiens
ctttttttaattttt

SEQ ID NO: 1907385 - DNA, 15 bp, Homo sapiens
tttttttaatttttt

SEQ ID NO: 1907386 - DNA, 15 bp, Homo sapiens
aatttttttgagaca

SEQ ID NO: 1907387 - DNA, 15 bp, Homo sapiens
atttttttgagacag

SEQ ID NO: 1907388 - DNA, 15 bp, Homo sapiens
ctctgtcacccaggt

SEQ ID NO: 1907389 - DNA, 15 bp, Homo sapiens
tctgtcacccaggtt

SEQ ID NO: 1907390 - DNA, 15 bp, Homo sapiens
ctgtcacccaggtta

SEQ ID NO: 1907391 - DNA, 15 bp, Homo sapiens
tgtcacccaggttag

SEQ ID NO: 1907392 - DNA, 15 bp, Homo sapiens
gtcacccaggttaga

SEQ ID NO: 1907393 - DNA, 15 bp, Homo sapiens
tcacccaggttagag

SEQ ID NO: 1907394 - DNA, 15 bp, Homo sapiens
cacccaggttagagt

SEQ ID NO: 1907395 - DNA, 15 bp, Homo sapiens
acccaggttagagtg

SEQ ID NO: 1907396 - DNA, 15 bp, Homo sapiens
caggttagagtgcag

SEQ ID NO: 1907397 - DNA, 15 bp, Homo sapiens
aggttagagtgcagt

SEQ ID NO: 1907398 - DNA, 15 bp, Homo sapiens
ggttagagtgcagtg

SEQ ID NO: 1907399 - DNA, 15 bp, Homo sapiens
gttagagtgcagtgg

SEQ ID NO: 1907400 - DNA, 15 bp, Homo sapiens
ttagagtgcagtggc

SEQ ID NO: 1907401 - DNA, 15 bp, Homo sapiens
agagtgcagtggcat

SEQ ID NO: 1907402 - DNA, 15 bp, Homo sapiens
gcatgatcttggctt

SEQ ID NO: 1907403 - DNA, 15 bp, Homo sapiens
catgatcttggctta

SEQ ID NO: 1907404 - DNA, 15 bp, Homo sapiens
atgatcttggcttac

SEQ ID NO: 1907405 - DNA, 15 bp, Homo sapiens
tgatcttggcttact

SEQ ID NO: 1907406 - DNA, 15 bp, Homo sapiens
atcttggcttactgc

SEQ ID NO: 1907407 - DNA, 15 bp, Homo sapiens
tcttggcttactgca

SEQ ID NO: 1907408 - DNA, 15 bp, Homo sapiens
cttggcttactgcaa

SEQ ID NO: 1907409 - DNA, 15 bp, Homo sapiens
ttggcttactgcaac

SEQ ID NO: 1907410 - DNA, 15 bp, Homo sapiens
gcttactgcaacctc

SEQ ID NO: 1907411 - DNA, 15 bp, Homo sapiens
cttactgcaacctcc

SEQ ID NO: 1907412 - DNA, 15 bp, Homo sapiens
ttactgcaacctcct

SEQ ID NO: 1907413 - DNA, 15 bp, Homo sapiens
tactgcaacctcctc

SEQ ID NO: 1907414 - DNA, 15 bp, Homo sapiens
acctcctcctcccag

SEQ ID NO: 1907415 - DNA, 15 bp, Homo sapiens
tttcaaaagccttgg

SEQ ID NO: 1907416 - DNA, 15 bp, Homo sapiens
ttcaaaagccttggg

SEQ ID NO: 1907417 - DNA, 15 bp, Homo sapiens
tcaaaagccttgggg

SEQ ID NO: 1907418 - DNA, 15 bp, Homo sapiens
caaaagccttggggt

SEQ ID NO: 1907419 - DNA, 15 bp, Homo sapiens
aaaagccttggggtg

SEQ ID NO: 1907420 - DNA, 15 bp, Homo sapiens
aaagccttggggtgc

SEQ ID NO: 1907421 - DNA, 15 bp, Homo sapiens
aagccttggggtgca

SEQ ID NO: 1907422 - DNA, 15 bp, Homo sapiens
agccttggggtgcat

SEQ ID NO: 1907423 - DNA, 15 bp, Homo sapiens
gccttggggtgcatt

SEQ ID NO: 1907424 - DNA, 15 bp, Homo sapiens
ccttggggtgcattg

SEQ ID NO: 1907425 - DNA, 15 bp, Homo sapiens
cttggggtgcattgt

SEQ ID NO: 1907426 - DNA, 15 bp, Homo sapiens
ttggggtgcattgtc

SEQ ID NO: 1907427 - DNA, 15 bp, Homo sapiens
tggggtgcattgtca

SEQ ID NO: 1907428 - DNA, 15 bp, Homo sapiens
ggggtgcattgtcat

SEQ ID NO: 1907429 - DNA, 15 bp, Homo sapiens
gggtgcattgtcatt

SEQ ID NO: 1907430 - DNA, 15 bp, Homo sapiens
ggtgcattgtcattt

SEQ ID NO: 1907431 - DNA, 15 bp, Homo sapiens
gtgcattgtcattta

SEQ ID NO: 1907432 - DNA, 15 bp, Homo sapiens
tgcattgtcatttac

SEQ ID NO: 1907433 - DNA, 15 bp, Homo sapiens
gcattgtcatttacg

SEQ ID NO: 1907434 - DNA, 15 bp, Homo sapiens
cattgtcatttacgt

SEQ ID NO: 1907435 - DNA, 15 bp, Homo sapiens
attgtcatttacgtg

SEQ ID NO: 1907436 - DNA, 15 bp, Homo sapiens
ttgtcatttacgtgt

SEQ ID NO: 1907437 - DNA, 15 bp, Homo sapiens
tgtcatttacgtgtc

SEQ ID NO: 1907438 - DNA, 15 bp, Homo sapiens
gtcatttacgtgtct

SEQ ID NO: 1907439 - DNA, 15 bp, Homo sapiens
tcatttacgtgtctg

SEQ ID NO: 1907440 - DNA, 15 bp, Homo sapiens
catttacgtgtctga

SEQ ID NO: 1907441 - DNA, 15 bp, Homo sapiens
atttacgtgtctgaa

SEQ ID NO: 1907442 - DNA, 15 bp, Homo sapiens
tttacgtgtctgaac

SEQ ID NO: 1907443 - DNA, 15 bp, Homo sapiens
ttacgtgtctgaaca

SEQ ID NO: 1907444 - DNA, 15 bp, Homo sapiens
tacgtgtctgaacaa

SEQ ID NO: 1907445 - DNA, 15 bp, Homo sapiens
acgtgtctgaacaaa

SEQ ID NO: 1907446 - DNA, 15 bp, Homo sapiens
cgtgtctgaacaaag

SEQ ID NO: 1907447 - DNA, 15 bp, Homo sapiens
gtgtctgaacaaagc

SEQ ID NO: 1907448 - DNA, 15 bp, Homo sapiens
tgtctgaacaaagcc

SEQ ID NO: 1907449 - DNA, 15 bp, Homo sapiens
gtctgaacaaagcca

SEQ ID NO: 1907450 - DNA, 15 bp, Homo sapiens
tctgaacaaagccac

SEQ ID NO: 1907451 - DNA, 15 bp, Homo sapiens
ctgaacaaagccaca

SEQ ID NO: 1907452 - DNA, 15 bp, Homo sapiens
tgaacaaagccacaa

SEQ ID NO: 1907453 - DNA, 15 bp, Homo sapiens
gaacaaagccacaaa

SEQ ID NO: 1907454 - DNA, 15 bp, Homo sapiens
aacaaagccacaaag

SEQ ID NO: 1907455 - DNA, 15 bp, Homo sapiens
acaaagccacaaagc

SEQ ID NO: 1907456 - DNA, 15 bp, Homo sapiens
caaagccacaaagct

SEQ ID NO: 1907457 - DNA, 15 bp, Homo sapiens
aaagccacaaagctg

SEQ ID NO: 1907458 - DNA, 15 bp, Homo sapiens
aagccacaaagctgg

SEQ ID NO: 1907459 - DNA, 15 bp, Homo sapiens
agccacaaagctggg

SEQ ID NO: 1907460 - DNA, 15 bp, Homo sapiens
gccacaaagctgggg

SEQ ID NO: 1907461 - DNA, 15 bp, Homo sapiens
ccacaaagctggggg

SEQ ID NO: 1907462 - DNA, 15 bp, Homo sapiens
cacaaagctgggggt

SEQ ID NO: 1907463 - DNA, 15 bp, Homo sapiens
acaaagctgggggta

SEQ ID NO: 1907464 - DNA, 15 bp, Homo sapiens
caaagctgggggtac

SEQ ID NO: 1907465 - DNA, 15 bp, Homo sapiens
aaagctgggggtaca

SEQ ID NO: 1907466 - DNA, 15 bp, Homo sapiens
aagctgggggtacag

SEQ ID NO: 1907467 - DNA, 15 bp, Homo sapiens
agctgggggtacaga

SEQ ID NO: 1907468 - DNA, 15 bp, Homo sapiens
gctgggggtacagat

SEQ ID NO: 1907469 - DNA, 15 bp, Homo sapiens
ctgggggtacagatt

SEQ ID NO: 1907470 - DNA, 15 bp, Homo sapiens
tgggggtacagattt

SEQ ID NO: 1907471 - DNA, 15 bp, Homo sapiens
gggggtacagatttg

SEQ ID NO: 1907472 - DNA, 15 bp, Homo sapiens
ggggtacagatttga

SEQ ID NO: 1907473 - DNA, 15 bp, Homo sapiens
gggtacagatttgat

SEQ ID NO: 1907474 - DNA, 15 bp, Homo sapiens
ggtacagatttgatt

SEQ ID NO: 1907475 - DNA, 15 bp, Homo sapiens
gtacagatttgattt

SEQ ID NO: 1907476 - DNA, 15 bp, Homo sapiens
tacagatttgatttg

SEQ ID NO: 1907477 - DNA, 15 bp, Homo sapiens
acagatttgatttgt

SEQ ID NO: 1907478 - DNA, 15 bp, Homo sapiens
cagatttgatttgtg

SEQ ID NO: 1907479 - DNA, 15 bp, Homo sapiens
agatttgatttgtgg

SEQ ID NO: 1907480 - DNA, 15 bp, Homo sapiens
gatttgatttgtggt

SEQ ID NO: 1907481 - DNA, 15 bp, Homo sapiens
atttgatttgtggtt

SEQ ID NO: 1907482 - DNA, 15 bp, Homo sapiens
tttgatttgtggttg

SEQ ID NO: 1907483 - DNA, 15 bp, Homo sapiens
ttgatttgtggttgc

SEQ ID NO: 1907484 - DNA, 15 bp, Homo sapiens
tgatttgtggttgct

SEQ ID NO: 1907485 - DNA, 15 bp, Homo sapiens
gatttgtggttgcta

SEQ ID NO: 1907486 - DNA, 15 bp, Homo sapiens
atttgtggttgctat

SEQ ID NO: 1907487 - DNA, 15 bp, Homo sapiens
tttgtggttgctatt

SEQ ID NO: 1907488 - DNA, 15 bp, Homo sapiens
ttgtggttgctattg

SEQ ID NO: 1907489 - DNA, 15 bp, Homo sapiens
tgtggttgctattgt

SEQ ID NO: 1907490 - DNA, 15 bp, Homo sapiens
gtggttgctattgtg

SEQ ID NO: 1907491 - DNA, 15 bp, Homo sapiens
tggttgctattgtga

SEQ ID NO: 1907492 - DNA, 15 bp, Homo sapiens
ggttgctattgtgac

SEQ ID NO: 1907493 - DNA, 15 bp, Homo sapiens
gttgctattgtgaca

SEQ ID NO: 1907494 - DNA, 15 bp, Homo sapiens
ttgctattgtgacaa

SEQ ID NO: 1907495 - DNA, 15 bp, Homo sapiens
tgctattgtgacaac

SEQ ID NO: 1907496 - DNA, 15 bp, Homo sapiens
gctattgtgacaacc

SEQ ID NO: 1907497 - DNA, 15 bp, Homo sapiens
ctattgtgacaacca

SEQ ID NO: 1907498 - DNA, 15 bp, Homo sapiens
tattgtgacaaccag

SEQ ID NO: 1907499 - DNA, 15 bp, Homo sapiens
attgtgacaaccagt

SEQ ID NO: 1907500 - DNA, 15 bp, Homo sapiens
ttgtgacaaccagtc

SEQ ID NO: 1907501 - DNA, 15 bp, Homo sapiens
tgtgacaaccagtcc

SEQ ID NO: 1907502 - DNA, 15 bp, Homo sapiens
gtgacaaccagtccc

SEQ ID NO: 1907503 - DNA, 15 bp, Homo sapiens
tgacaaccagtccct

SEQ ID NO: 1907504 - DNA, 15 bp, Homo sapiens
gacaaccagtccctc

SEQ ID NO: 1907505 - DNA, 15 bp, Homo sapiens
acaaccagtccctct

SEQ ID NO: 1907506 - DNA, 15 bp, Homo sapiens
caaccagtccctctt

SEQ ID NO: 1907507 - DNA, 15 bp, Homo sapiens
aaccagtccctcttt

SEQ ID NO: 1907508 - DNA, 15 bp, Homo sapiens
accagtccctctttt

SEQ ID NO: 1907509 - DNA, 15 bp, Homo sapiens
ccagtccctcttttc

SEQ ID NO: 1907510 - DNA, 15 bp, Homo sapiens
cagtccctcttttcc

SEQ ID NO: 1907511 - DNA, 15 bp, Homo sapiens
agtccctcttttcct

SEQ ID NO: 1907512 - DNA, 15 bp, Homo sapiens
gtccctcttttcctt

SEQ ID NO: 1907513 - DNA, 15 bp, Homo sapiens
tccctcttttccttg

SEQ ID NO: 1907514 - DNA, 15 bp, Homo sapiens
ccctcttttccttgt

SEQ ID NO: 1907515 - DNA, 15 bp, Homo sapiens
cctcttttccttgtt

SEQ ID NO: 1907516 - DNA, 15 bp, Homo sapiens
ctcttttccttgttt

SEQ ID NO: 1907517 - DNA, 15 bp, Homo sapiens
tcttttccttgttta

SEQ ID NO: 1907518 - DNA, 15 bp, Homo sapiens
cttttccttgtttag

SEQ ID NO: 1907519 - DNA, 15 bp, Homo sapiens
ttttccttgtttagt

SEQ ID NO: 1907520 - DNA, 15 bp, Homo sapiens
tttccttgtttagtt

SEQ ID NO: 1907521 - DNA, 15 bp, Homo sapiens
ttccttgtttagttt

SEQ ID NO: 1907522 - DNA, 15 bp, Homo sapiens
tccttgtttagtttt

SEQ ID NO: 1907523 - DNA, 15 bp, Homo sapiens
ccttgtttagttttt

SEQ ID NO: 1907524 - DNA, 15 bp, Homo sapiens
cttgtttagtttttt

SEQ ID NO: 1907525 - DNA, 15 bp, Homo sapiens
ttgtttagtttttta

SEQ ID NO: 1907526 - DNA, 15 bp, Homo sapiens
tgtttagttttttac

SEQ ID NO: 1907527 - DNA, 15 bp, Homo sapiens
gtttagttttttact

SEQ ID NO: 1907528 - DNA, 15 bp, Homo sapiens
tttagttttttactt

SEQ ID NO: 1907529 - DNA, 15 bp, Homo sapiens
ttagttttttacttg

SEQ ID NO: 1907530 - DNA, 15 bp, Homo sapiens
tagttttttacttgt

SEQ ID NO: 1907531 - DNA, 15 bp, Homo sapiens
agttttttacttgta

SEQ ID NO: 1907532 - DNA, 15 bp, Homo sapiens
gttttttacttgtac

SEQ ID NO: 1907533 - DNA, 15 bp, Homo sapiens
ttttttacttgtaca

SEQ ID NO: 1907534 - DNA, 15 bp, Homo sapiens
tttttacttgtacat

SEQ ID NO: 1907535 - DNA, 15 bp, Homo sapiens
ttttacttgtacatg

SEQ ID NO: 1907536 - DNA, 15 bp, Homo sapiens
tttacttgtacatgt

SEQ ID NO: 1907537 - DNA, 15 bp, Homo sapiens
ttacttgtacatgtc

SEQ ID NO: 1907538 - DNA, 15 bp, Homo sapiens
tacttgtacatgtca

SEQ ID NO: 1907539 - DNA, 15 bp, Homo sapiens
acttgtacatgtcat

SEQ ID NO: 1907540 - DNA, 15 bp, Homo sapiens
cttgtacatgtcatt

SEQ ID NO: 1907541 - DNA, 15 bp, Homo sapiens
ttgtacatgtcattc

SEQ ID NO: 1907542 - DNA, 15 bp, Homo sapiens
tgtacatgtcattca

SEQ ID NO: 1907543 - DNA, 15 bp, Homo sapiens
gtacatgtcattcat

SEQ ID NO: 1907544 - DNA, 15 bp, Homo sapiens
tacatgtcattcatg

SEQ ID NO: 1907545 - DNA, 15 bp, Homo sapiens
acatgtcattcatgc

SEQ ID NO: 1907546 - DNA, 15 bp, Homo sapiens
catgtcattcatgca

SEQ ID NO: 1907547 - DNA, 15 bp, Homo sapiens
atgtcattcatgcat

SEQ ID NO: 1907548 - DNA, 15 bp, Homo sapiens
tgtcattcatgcata

SEQ ID NO: 1907549 - DNA, 15 bp, Homo sapiens
gtcattcatgcatat

SEQ ID NO: 1907550 - DNA, 15 bp, Homo sapiens
tcattcatgcatatt

SEQ ID NO: 1907551 - DNA, 15 bp, Homo sapiens
cattcatgcatatta

SEQ ID NO: 1907552 - DNA, 15 bp, Homo sapiens
attcatgcatattat

SEQ ID NO: 1907553 - DNA, 15 bp, Homo sapiens
ttcatgcatattata

SEQ ID NO: 1907554 - DNA, 15 bp, Homo sapiens
tcatgcatattatat

SEQ ID NO: 1907555 - DNA, 15 bp, Homo sapiens
catgcatattatata

SEQ ID NO: 1907556 - DNA, 15 bp, Homo sapiens
atgcatattatatat

SEQ ID NO: 1907557 - DNA, 15 bp, Homo sapiens
tgcatattatatata

SEQ ID NO: 1907558 - DNA, 15 bp, Homo sapiens
gcatattatatataa

SEQ ID NO: 1907559 - DNA, 15 bp, Homo sapiens
catattatatataag

SEQ ID NO: 1907560 - DNA, 15 bp, Homo sapiens
atattatatataaga

SEQ ID NO: 1907561 - DNA, 15 bp, Homo sapiens
tattatatataagac

SEQ ID NO: 1907562 - DNA, 15 bp, Homo sapiens
attatatataagact

SEQ ID NO: 1907563 - DNA, 15 bp, Homo sapiens
ttatatataagactg

SEQ ID NO: 1907564 - DNA, 15 bp, Homo sapiens
tatatataagactga

SEQ ID NO: 1907565 - DNA, 15 bp, Homo sapiens
atatataagactgag

SEQ ID NO: 1907566 - DNA, 15 bp, Homo sapiens
tatataagactgaga

SEQ ID NO: 1907567 - DNA, 15 bp, Homo sapiens
atataagactgagat

SEQ ID NO: 1907568 - DNA, 15 bp, Homo sapiens
tataagactgagatc

SEQ ID NO: 1907569 - DNA, 15 bp, Homo sapiens
ataagactgagatca

SEQ ID NO: 1907570 - DNA, 15 bp, Homo sapiens
taagactgagatcat

SEQ ID NO: 1907571 - DNA, 15 bp, Homo sapiens
aagactgagatcatg

SEQ ID NO: 1907572 - DNA, 15 bp, Homo sapiens
agactgagatcatgt

SEQ ID NO: 1907573 - DNA, 15 bp, Homo sapiens
gactgagatcatgtg

SEQ ID NO: 1907574 - DNA, 15 bp, Homo sapiens
actgagatcatgtgt

SEQ ID NO: 1907575 - DNA, 15 bp, Homo sapiens
ctgagatcatgtgtt

SEQ ID NO: 1907576 - DNA, 15 bp, Homo sapiens
tgagatcatgtgtta

SEQ ID NO: 1907577 - DNA, 15 bp, Homo sapiens
gagatcatgtgttaa

SEQ ID NO: 1907578 - DNA, 15 bp, Homo sapiens
agatcatgtgttaat

SEQ ID NO: 1907579 - DNA, 15 bp, Homo sapiens
gatcatgtgttaatt

SEQ ID NO: 1907580 - DNA, 15 bp, Homo sapiens
atcatgtgttaatta

SEQ ID NO: 1907581 - DNA, 15 bp, Homo sapiens
tcatgtgttaattaa

SEQ ID NO: 1907582 - DNA, 15 bp, Homo sapiens
catgtgttaattaac

SEQ ID NO: 1907583 - DNA, 15 bp, Homo sapiens
atgtgttaattaacg

SEQ ID NO: 1907584 - DNA, 15 bp, Homo sapiens
tgtgttaattaacga

SEQ ID NO: 1907585 - DNA, 15 bp, Homo sapiens
gtgttaattaacgac

SEQ ID NO: 1907586 - DNA, 15 bp, Homo sapiens
tgttaattaacgact

SEQ ID NO: 1907587 - DNA, 15 bp, Homo sapiens
gttaattaacgactg

SEQ ID NO: 1907588 - DNA, 15 bp, Homo sapiens
ttaattaacgactgg

SEQ ID NO: 1907589 - DNA, 15 bp, Homo sapiens
taattaacgactggg

SEQ ID NO: 1907590 - DNA, 15 bp, Homo sapiens
aattaacgactggga

SEQ ID NO: 1907591 - DNA, 15 bp, Homo sapiens
attaacgactgggat

SEQ ID NO: 1907592 - DNA, 15 bp, Homo sapiens
ttaacgactgggata

SEQ ID NO: 1907593 - DNA, 15 bp, Homo sapiens
taacgactgggatac

SEQ ID NO: 1907594 - DNA, 15 bp, Homo sapiens
aacgactgggatacg

SEQ ID NO: 1907595 - DNA, 15 bp, Homo sapiens
acgactgggatacgt

SEQ ID NO: 1907596 - DNA, 15 bp, Homo sapiens
cgactgggatacgtt

SEQ ID NO: 1907597 - DNA, 15 bp, Homo sapiens
gactgggatacgttc

SEQ ID NO: 1907598 - DNA, 15 bp, Homo sapiens
actgggatacgttct

SEQ ID NO: 1907599 - DNA, 15 bp, Homo sapiens
ctgggatacgttctg

SEQ ID NO: 1907600 - DNA, 15 bp, Homo sapiens
tgggatacgttctgc

SEQ ID NO: 1907601 - DNA, 15 bp, Homo sapiens
gggatacgttctgca

SEQ ID NO: 1907602 - DNA, 15 bp, Homo sapiens
ggatacgttctgcaa

SEQ ID NO: 1907603 - DNA, 15 bp, Homo sapiens
gatacgttctgcaaa

SEQ ID NO: 1907604 - DNA, 15 bp, Homo sapiens
atacgttctgcaaaa

SEQ ID NO: 1907605 - DNA, 15 bp, Homo sapiens
tacgttctgcaaaat

SEQ ID NO: 1907606 - DNA, 15 bp, Homo sapiens
acgttctgcaaaatg

SEQ ID NO: 1907607 - DNA, 15 bp, Homo sapiens
cgttctgcaaaatgt

SEQ ID NO: 1907608 - DNA, 15 bp, Homo sapiens
gttctgcaaaatgta

SEQ ID NO: 1907609 - DNA, 15 bp, Homo sapiens
ttctgcaaaatgtat

SEQ ID NO: 1907610 - DNA, 15 bp, Homo sapiens
tctgcaaaatgtatc

SEQ ID NO: 1907611 - DNA, 15 bp, Homo sapiens
ctgcaaaatgtatca

SEQ ID NO: 1907612 - DNA, 15 bp, Homo sapiens
tgcaaaatgtatcat

SEQ ID NO: 1907613 - DNA, 15 bp, Homo sapiens
gcaaaatgtatcatt

SEQ ID NO: 1907614 - DNA, 15 bp, Homo sapiens
caaaatgtatcatta

SEQ ID NO: 1907615 - DNA, 15 bp, Homo sapiens
aaaatgtatcattag

SEQ ID NO: 1907616 - DNA, 15 bp, Homo sapiens
aaatgtatcattagg

SEQ ID NO: 1907617 - DNA, 15 bp, Homo sapiens
aatgtatcattaggc

SEQ ID NO: 1907618 - DNA, 15 bp, Homo sapiens
atgtatcattaggca

SEQ ID NO: 1907619 - DNA, 15 bp, Homo sapiens
tgtatcattaggcaa

SEQ ID NO: 1907620 - DNA, 15 bp, Homo sapiens
gtatcattaggcaat

SEQ ID NO: 1907621 - DNA, 15 bp, Homo sapiens
tatcattaggcaatt

SEQ ID NO: 1907622 - DNA, 15 bp, Homo sapiens
atcattaggcaattt

SEQ ID NO: 1907623 - DNA, 15 bp, Homo sapiens
tcattaggcaatttt

SEQ ID NO: 1907624 - DNA, 15 bp, Homo sapiens
cattaggcaattttg

SEQ ID NO: 1907625 - DNA, 15 bp, Homo sapiens
attaggcaattttgt

SEQ ID NO: 1907626 - DNA, 15 bp, Homo sapiens
ttaggcaattttgtt

SEQ ID NO: 1907627 - DNA, 15 bp, Homo sapiens
taggcaattttgttg

SEQ ID NO: 1907628 - DNA, 15 bp, Homo sapiens
aggcaattttgttgt

SEQ ID NO: 1907629 - DNA, 15 bp, Homo sapiens
ggcaattttgttgtg

SEQ ID NO: 1907630 - DNA, 15 bp, Homo sapiens
gcaattttgttgtgc

SEQ ID NO: 1907631 - DNA, 15 bp, Homo sapiens
caattttgttgtgca

SEQ ID NO: 1907632 - DNA, 15 bp, Homo sapiens
aattttgttgtgcaa

SEQ ID NO: 1907633 - DNA, 15 bp, Homo sapiens
attttgttgtgcaaa

SEQ ID NO: 1907634 - DNA, 15 bp, Homo sapiens
ttttgttgtgcaaat

SEQ ID NO: 1907635 - DNA, 15 bp, Homo sapiens
tttgttgtgcaaatg

SEQ ID NO: 1907636 - DNA, 15 bp, Homo sapiens
ttgttgtgcaaatgt

SEQ ID NO: 1907637 - DNA, 15 bp, Homo sapiens
tgttgtgcaaatgtt

SEQ ID NO: 1907638 - DNA, 15 bp, Homo sapiens
gttgtgcaaatgttg

SEQ ID NO: 1907639 - DNA, 15 bp, Homo sapiens
ttgtgcaaatgttgt

SEQ ID NO: 1907640 - DNA, 15 bp, Homo sapiens
tgtgcaaatgttgta

SEQ ID NO: 1907641 - DNA, 15 bp, Homo sapiens
gtgcaaatgttgtag

SEQ ID NO: 1907642 - DNA, 15 bp, Homo sapiens
tgcaaatgttgtaga

SEQ ID NO: 1907643 - DNA, 15 bp, Homo sapiens
gcaaatgttgtagag

SEQ ID NO: 1907644 - DNA, 15 bp, Homo sapiens
caaatgttgtagagt

SEQ ID NO: 1907645 - DNA, 15 bp, Homo sapiens
aaatgttgtagagta

SEQ ID NO: 1907646 - DNA, 15 bp, Homo sapiens
aatgttgtagagtat

SEQ ID NO: 1907647 - DNA, 15 bp, Homo sapiens
atgttgtagagtata

SEQ ID NO: 1907648 - DNA, 15 bp, Homo sapiens
tgttgtagagtatat

SEQ ID NO: 1907649 - DNA, 15 bp, Homo sapiens
gttgtagagtatata

SEQ ID NO: 1907650 - DNA, 15 bp, Homo sapiens
ttgtagagtatatag

SEQ ID NO: 1907651 - DNA, 15 bp, Homo sapiens
tgtagagtatatagt

SEQ ID NO: 1907652 - DNA, 15 bp, Homo sapiens
gtagagtatatagtc

SEQ ID NO: 1907653 - DNA, 15 bp, Homo sapiens
tagagtatatagtcc

SEQ ID NO: 1907654 - DNA, 15 bp, Homo sapiens
agagtatatagtcct

SEQ ID NO: 1907655 - DNA, 15 bp, Homo sapiens
gagtatatagtcctt

SEQ ID NO: 1907656 - DNA, 15 bp, Homo sapiens
agtatatagtcctta

SEQ ID NO: 1907657 - DNA, 15 bp, Homo sapiens
gtatatagtccttac

SEQ ID NO: 1907658 - DNA, 15 bp, Homo sapiens
tatatagtccttaca

SEQ ID NO: 1907659 - DNA, 15 bp, Homo sapiens
atatagtccttacac

SEQ ID NO: 1907660 - DNA, 15 bp, Homo sapiens
tatagtccttacaca

SEQ ID NO: 1907661 - DNA, 15 bp, Homo sapiens
atagtccttacacaa

SEQ ID NO: 1907662 - DNA, 15 bp, Homo sapiens
tagtccttacacaaa

SEQ ID NO: 1907663 - DNA, 15 bp, Homo sapiens
agtccttacacaaac

SEQ ID NO: 1907664 - DNA, 15 bp, Homo sapiens
gtccttacacaaacc

SEQ ID NO: 1907665 - DNA, 15 bp, Homo sapiens
tccttacacaaacct

SEQ ID NO: 1907666 - DNA, 15 bp, Homo sapiens
ccttacacaaacctg

SEQ ID NO: 1907667 - DNA, 15 bp, Homo sapiens
cttacacaaacctgg

SEQ ID NO: 1907668 - DNA, 15 bp, Homo sapiens
ttacacaaacctggg

SEQ ID NO: 1907669 - DNA, 15 bp, Homo sapiens
tacacaaacctgggt

SEQ ID NO: 1907670 - DNA, 15 bp, Homo sapiens
acacaaacctgggtg

SEQ ID NO: 1907671 - DNA, 15 bp, Homo sapiens
cacaaacctgggtgg

SEQ ID NO: 1907672 - DNA, 15 bp, Homo sapiens
acaaacctgggtggc

SEQ ID NO: 1907673 - DNA, 15 bp, Homo sapiens
caaacctgggtggca

SEQ ID NO: 1907674 - DNA, 15 bp, Homo sapiens
aaacctgggtggcag

SEQ ID NO: 1907675 - DNA, 15 bp, Homo sapiens
aacctgggtggcaga

SEQ ID NO: 1907676 - DNA, 15 bp, Homo sapiens
acctgggtggcagaa

SEQ ID NO: 1907677 - DNA, 15 bp, Homo sapiens
cctgggtggcagaac

SEQ ID NO: 1907678 - DNA, 15 bp, Homo sapiens
ctgggtggcagaacc

SEQ ID NO: 1907679 - DNA, 15 bp, Homo sapiens
tgggtggcagaacct

SEQ ID NO: 1907680 - DNA, 15 bp, Homo sapiens
gggtggcagaaccta

SEQ ID NO: 1907681 - DNA, 15 bp, Homo sapiens
ggtggcagaacctac

SEQ ID NO: 1907682 - DNA, 15 bp, Homo sapiens
gtggcagaacctact

SEQ ID NO: 1907683 - DNA, 15 bp, Homo sapiens
tggcagaacctactg

SEQ ID NO: 1907684 - DNA, 15 bp, Homo sapiens
ggcagaacctactgc

SEQ ID NO: 1907685 - DNA, 15 bp, Homo sapiens
gcagaacctactgca

SEQ ID NO: 1907686 - DNA, 15 bp, Homo sapiens
cagaacctactgcac

SEQ ID NO: 1907687 - DNA, 15 bp, Homo sapiens
agaacctactgcaca

SEQ ID NO: 1907688 - DNA, 15 bp, Homo sapiens
gaacctactgcacac

SEQ ID NO: 1907689 - DNA, 15 bp, Homo sapiens
aacctactgcacacc

SEQ ID NO: 1907690 - DNA, 15 bp, Homo sapiens
acctactgcacacct

SEQ ID NO: 1907691 - DNA, 15 bp, Homo sapiens
cctactgcacaccta

SEQ ID NO: 1907692 - DNA, 15 bp, Homo sapiens
ctactgcacacctac

SEQ ID NO: 1907693 - DNA, 15 bp, Homo sapiens
tactgcacacctacg

SEQ ID NO: 1907694 - DNA, 15 bp, Homo sapiens
actgcacacctacgc

SEQ ID NO: 1907695 - DNA, 15 bp, Homo sapiens
ctgcacacctacgct

SEQ ID NO: 1907696 - DNA, 15 bp, Homo sapiens
tgcacacctacgcta

SEQ ID NO: 1907697 - DNA, 15 bp, Homo sapiens
gcacacctacgctat

SEQ ID NO: 1907698 - DNA, 15 bp, Homo sapiens
cacacctacgctatg

SEQ ID NO: 1907699 - DNA, 15 bp, Homo sapiens
acacctacgctatgt

SEQ ID NO: 1907700 - DNA, 15 bp, Homo sapiens
cacctacgctatgtg

SEQ ID NO: 1907701 - DNA, 15 bp, Homo sapiens
acctacgctatgtgg

SEQ ID NO: 1907702 - DNA, 15 bp, Homo sapiens
cctacgctatgtggc

SEQ ID NO: 1907703 - DNA, 15 bp, Homo sapiens
ctacgctatgtggca

SEQ ID NO: 1907704 - DNA, 15 bp, Homo sapiens
tacgctatgtggcag

SEQ ID NO: 1907705 - DNA, 15 bp, Homo sapiens
acgctatgtggcaga

SEQ ID NO: 1907706 - DNA, 15 bp, Homo sapiens
cgctatgtggcagag

SEQ ID NO: 1907707 - DNA, 15 bp, Homo sapiens
gctatgtggcagagc

SEQ ID NO: 1907708 - DNA, 15 bp, Homo sapiens
ctatgtggcagagcc

SEQ ID NO: 1907709 - DNA, 15 bp, Homo sapiens
tatgtggcagagcct

SEQ ID NO: 1907710 - DNA, 15 bp, Homo sapiens
atgtggcagagccta

SEQ ID NO: 1907711 - DNA, 15 bp, Homo sapiens
tgtggcagagcctac

SEQ ID NO: 1907712 - DNA, 15 bp, Homo sapiens
gtggcagagcctact

SEQ ID NO: 1907713 - DNA, 15 bp, Homo sapiens
tggcagagcctactg

SEQ ID NO: 1907714 - DNA, 15 bp, Homo sapiens
ggcagagcctactgg

SEQ ID NO: 1907715 - DNA, 15 bp, Homo sapiens
gcagagcctactggt

SEQ ID NO: 1907716 - DNA, 15 bp, Homo sapiens
cagagcctactggtc

SEQ ID NO: 1907717 - DNA, 15 bp, Homo sapiens
agagcctactggtcg

SEQ ID NO: 1907718 - DNA, 15 bp, Homo sapiens
gagcctactggtcgt

SEQ ID NO: 1907719 - DNA, 15 bp, Homo sapiens
agcctactggtcgta

SEQ ID NO: 1907720 - DNA, 15 bp, Homo sapiens
gcctactggtcgtag

SEQ ID NO: 1907721 - DNA, 15 bp, Homo sapiens
cctactggtcgtagg

SEQ ID NO: 1907722 - DNA, 15 bp, Homo sapiens
ctactggtcgtaggc

SEQ ID NO: 1907723 - DNA, 15 bp, Homo sapiens
tactggtcgtaggct

SEQ ID NO: 1907724 - DNA, 15 bp, Homo sapiens
actggtcgtaggctg

SEQ ID NO: 1907725 - DNA, 15 bp, Homo sapiens
ctggtcgtaggctgt

SEQ ID NO: 1907726 - DNA, 15 bp, Homo sapiens
tggtcgtaggctgta

SEQ ID NO: 1907727 - DNA, 15 bp, Homo sapiens
ggtcgtaggctgtaa

SEQ ID NO: 1907728 - DNA, 15 bp, Homo sapiens
gtcgtaggctgtaaa

SEQ ID NO: 1907729 - DNA, 15 bp, Homo sapiens
tcgtaggctgtaaac

SEQ ID NO: 1907730 - DNA, 15 bp, Homo sapiens
cgtaggctgtaaacc

SEQ ID NO: 1907731 - DNA, 15 bp, Homo sapiens
gtaggctgtaaacct

SEQ ID NO: 1907732 - DNA, 15 bp, Homo sapiens
taggctgtaaacctg

SEQ ID NO: 1907733 - DNA, 15 bp, Homo sapiens
aggctgtaaacctgt

SEQ ID NO: 1907734 - DNA, 15 bp, Homo sapiens
ggctgtaaacctgta

SEQ ID NO: 1907735 - DNA, 15 bp, Homo sapiens
gctgtaaacctgtac

SEQ ID NO: 1907736 - DNA, 15 bp, Homo sapiens
ctgtaaacctgtaca

SEQ ID NO: 1907737 - DNA, 15 bp, Homo sapiens
tgtaaacctgtacag

SEQ ID NO: 1907738 - DNA, 15 bp, Homo sapiens
gtaaacctgtacagt

SEQ ID NO: 1907739 - DNA, 15 bp, Homo sapiens
taaacctgtacagta

SEQ ID NO: 1907740 - DNA, 15 bp, Homo sapiens
aaacctgtacagtat

SEQ ID NO: 1907741 - DNA, 15 bp, Homo sapiens
aacctgtacagtatg

SEQ ID NO: 1907742 - DNA, 15 bp, Homo sapiens
acctgtacagtatgt

SEQ ID NO: 1907743 - DNA, 15 bp, Homo sapiens
cctgtacagtatgtt

SEQ ID NO: 1907744 - DNA, 15 bp, Homo sapiens
ctgtacagtatgtta

SEQ ID NO: 1907745 - DNA, 15 bp, Homo sapiens
tgtacagtatgttac

SEQ ID NO: 1907746 - DNA, 15 bp, Homo sapiens
gtacagtatgttact

SEQ ID NO: 1907747 - DNA, 15 bp, Homo sapiens
tacagtatgttactg

SEQ ID NO: 1907748 - DNA, 15 bp, Homo sapiens
acagtatgttactgt

SEQ ID NO: 1907749 - DNA, 15 bp, Homo sapiens
cagtatgttactgtg

SEQ ID NO: 1907750 - DNA, 15 bp, Homo sapiens
agtatgttactgtgc

SEQ ID NO: 1907751 - DNA, 15 bp, Homo sapiens
gtatgttactgtgct

SEQ ID NO: 1907752 - DNA, 15 bp, Homo sapiens
tatgttactgtgctg

SEQ ID NO: 1907753 - DNA, 15 bp, Homo sapiens
atgttactgtgctga

SEQ ID NO: 1907754 - DNA, 15 bp, Homo sapiens
tgttactgtgctgaa

SEQ ID NO: 1907755 - DNA, 15 bp, Homo sapiens
gttactgtgctgaat

SEQ ID NO: 1907756 - DNA, 15 bp, Homo sapiens
ttactgtgctgaata

SEQ ID NO: 1907757 - DNA, 15 bp, Homo sapiens
tactgtgctgaatac

SEQ ID NO: 1907758 - DNA, 15 bp, Homo sapiens
actgtgctgaatacc

SEQ ID NO: 1907759 - DNA, 15 bp, Homo sapiens
ctgtgctgaataccg

SEQ ID NO: 1907760 - DNA, 15 bp, Homo sapiens
tgtgctgaataccgt

SEQ ID NO: 1907761 - DNA, 15 bp, Homo sapiens
gtgctgaataccgta

SEQ ID NO: 1907762 - DNA, 15 bp, Homo sapiens
tgctgaataccgtag

SEQ ID NO: 1907763 - DNA, 15 bp, Homo sapiens
gctgaataccgtagg

SEQ ID NO: 1907764 - DNA, 15 bp, Homo sapiens
ctgaataccgtaggc

SEQ ID NO: 1907765 - DNA, 15 bp, Homo sapiens
tgaataccgtaggca

SEQ ID NO: 1907766 - DNA, 15 bp, Homo sapiens
gaataccgtaggcaa

SEQ ID NO: 1907767 - DNA, 15 bp, Homo sapiens
aataccgtaggcaat

SEQ ID NO: 1907768 - DNA, 15 bp, Homo sapiens
ataccgtaggcaatt

SEQ ID NO: 1907769 - DNA, 15 bp, Homo sapiens
taccgtaggcaattg

SEQ ID NO: 1907770 - DNA, 15 bp, Homo sapiens
accgtaggcaattgt

SEQ ID NO: 1907771 - DNA, 15 bp, Homo sapiens
ccgtaggcaattgta

SEQ ID NO: 1907772 - DNA, 15 bp, Homo sapiens
cgtaggcaattgtaa

SEQ ID NO: 1907773 - DNA, 15 bp, Homo sapiens
gtaggcaattgtaac

SEQ ID NO: 1907774 - DNA, 15 bp, Homo sapiens
taggcaattgtaaca

SEQ ID NO: 1907775 - DNA, 15 bp, Homo sapiens
aggcaattgtaacac

SEQ ID NO: 1907776 - DNA, 15 bp, Homo sapiens
ggcaattgtaacaca

SEQ ID NO: 1907777 - DNA, 15 bp, Homo sapiens
gcaattgtaacacat

SEQ ID NO: 1907778 - DNA, 15 bp, Homo sapiens
caattgtaacacatc

SEQ ID NO: 1907779 - DNA, 15 bp, Homo sapiens
aattgtaacacatct

SEQ ID NO: 1907780 - DNA, 15 bp, Homo sapiens
attgtaacacatctc

SEQ ID NO: 1907781 - DNA, 15 bp, Homo sapiens
ttgtaacacatctca

SEQ ID NO: 1907782 - DNA, 15 bp, Homo sapiens
tgtaacacatctcaa

SEQ ID NO: 1907783 - DNA, 15 bp, Homo sapiens
gtaacacatctcaat

SEQ ID NO: 1907784 - DNA, 15 bp, Homo sapiens
taacacatctcaatg

SEQ ID NO: 1907785 - DNA, 15 bp, Homo sapiens
aacacatctcaatga

SEQ ID NO: 1907786 - DNA, 15 bp, Homo sapiens
acacatctcaatgaa

SEQ ID NO: 1907787 - DNA, 15 bp, Homo sapiens
cacatctcaatgaag

SEQ ID NO: 1907788 - DNA, 15 bp, Homo sapiens
acatctcaatgaagt

SEQ ID NO: 1907789 - DNA, 15 bp, Homo sapiens
catctcaatgaagta

SEQ ID NO: 1907790 - DNA, 15 bp, Homo sapiens
atctcaatgaagtag

SEQ ID NO: 1907791 - DNA, 15 bp, Homo sapiens
tctcaatgaagtagg

SEQ ID NO: 1907792 - DNA, 15 bp, Homo sapiens
ctcaatgaagtagga

SEQ ID NO: 1907793 - DNA, 15 bp, Homo sapiens
tcaatgaagtaggaa

SEQ ID NO: 1907794 - DNA, 15 bp, Homo sapiens
caatgaagtaggaat

SEQ ID NO: 1907795 - DNA, 15 bp, Homo sapiens
aatgaagtaggaatt

SEQ ID NO: 1907796 - DNA, 15 bp, Homo sapiens
atgaagtaggaattt

SEQ ID NO: 1907797 - DNA, 15 bp, Homo sapiens
tgaagtaggaatttt

SEQ ID NO: 1907798 - DNA, 15 bp, Homo sapiens
gaagtaggaattttt

SEQ ID NO: 1907799 - DNA, 15 bp, Homo sapiens
aagtaggaatttttc

SEQ ID NO: 1907800 - DNA, 15 bp, Homo sapiens
agtaggaatttttca

SEQ ID NO: 1907801 - DNA, 15 bp, Homo sapiens
gtaggaatttttcag

SEQ ID NO: 1907802 - DNA, 15 bp, Homo sapiens
taggaatttttcagc

SEQ ID NO: 1907803 - DNA, 15 bp, Homo sapiens
aggaatttttcagct

SEQ ID NO: 1907804 - DNA, 15 bp, Homo sapiens
ggaatttttcagctc

SEQ ID NO: 1907805 - DNA, 15 bp, Homo sapiens
gaatttttcagctcc

SEQ ID NO: 1907806 - DNA, 15 bp, Homo sapiens
aatttttcagctcca

SEQ ID NO: 1907807 - DNA, 15 bp, Homo sapiens
atttttcagctccat

SEQ ID NO: 1907808 - DNA, 15 bp, Homo sapiens
tttttcagctccatg

SEQ ID NO: 1907809 - DNA, 15 bp, Homo sapiens
ttttcagctccatga

SEQ ID NO: 1907810 - DNA, 15 bp, Homo sapiens
tttcagctccatgat

SEQ ID NO: 1907811 - DNA, 15 bp, Homo sapiens
ttcagctccatgata

SEQ ID NO: 1907812 - DNA, 15 bp, Homo sapiens
tcagctccatgataa

SEQ ID NO: 1907813 - DNA, 15 bp, Homo sapiens
cagctccatgataat

SEQ ID NO: 1907814 - DNA, 15 bp, Homo sapiens
agctccatgataatc

SEQ ID NO: 1907815 - DNA, 15 bp, Homo sapiens
gctccatgataatct

SEQ ID NO: 1907816 - DNA, 15 bp, Homo sapiens
ctccatgataatctt

SEQ ID NO: 1907817 - DNA, 15 bp, Homo sapiens
tccatgataatctta

SEQ ID NO: 1907818 - DNA, 15 bp, Homo sapiens
ccatgataatcttat

SEQ ID NO: 1907819 - DNA, 15 bp, Homo sapiens
catgataatcttatg

SEQ ID NO: 1907820 - DNA, 15 bp, Homo sapiens
atgataatcttatgg

SEQ ID NO: 1907821 - DNA, 15 bp, Homo sapiens
tgataatcttatggg

SEQ ID NO: 1907822 - DNA, 15 bp, Homo sapiens
gataatcttatggga

SEQ ID NO: 1907823 - DNA, 15 bp, Homo sapiens
ataatcttatgggac

SEQ ID NO: 1907824 - DNA, 15 bp, Homo sapiens
taatcttatgggacc

SEQ ID NO: 1907825 - DNA, 15 bp, Homo sapiens
aatcttatgggacca

SEQ ID NO: 1907826 - DNA, 15 bp, Homo sapiens
atcttatgggaccac

SEQ ID NO: 1907827 - DNA, 15 bp, Homo sapiens
tcttatgggaccacc

SEQ ID NO: 1907828 - DNA, 15 bp, Homo sapiens
cttatgggaccacca

SEQ ID NO: 1907829 - DNA, 15 bp, Homo sapiens
ttatgggaccaccat

SEQ ID NO: 1907830 - DNA, 15 bp, Homo sapiens
tatgggaccaccatc

SEQ ID NO: 1907831 - DNA, 15 bp, Homo sapiens
atgggaccaccatca

SEQ ID NO: 1907832 - DNA, 15 bp, Homo sapiens
tgggaccaccatcat

SEQ ID NO: 1907833 - DNA, 15 bp, Homo sapiens
gggaccaccatcata

SEQ ID NO: 1907834 - DNA, 15 bp, Homo sapiens
ggaccaccatcatat

SEQ ID NO: 1907835 - DNA, 15 bp, Homo sapiens
gaccaccatcatata

SEQ ID NO: 1907836 - DNA, 15 bp, Homo sapiens
accaccatcatatat

SEQ ID NO: 1907837 - DNA, 15 bp, Homo sapiens
ccaccatcatatatg

SEQ ID NO: 1907838 - DNA, 15 bp, Homo sapiens
caccatcatatatgc

SEQ ID NO: 1907839 - DNA, 15 bp, Homo sapiens
accatcatatatgca

SEQ ID NO: 1907840 - DNA, 15 bp, Homo sapiens
ccatcatatatgcat

SEQ ID NO: 1907841 - DNA, 15 bp, Homo sapiens
catcatatatgcatt

SEQ ID NO: 1907842 - DNA, 15 bp, Homo sapiens
atcatatatgcattt

SEQ ID NO: 1907843 - DNA, 15 bp, Homo sapiens
tcatatatgcatttt

SEQ ID NO: 1907844 - DNA, 15 bp, Homo sapiens
catatatgcattttg

SEQ ID NO: 1907845 - DNA, 15 bp, Homo sapiens
atatatgcattttgt

SEQ ID NO: 1907846 - DNA, 15 bp, Homo sapiens
tatatgcattttgtt

SEQ ID NO: 1907847 - DNA, 15 bp, Homo sapiens
atatgcattttgttg

SEQ ID NO: 1907848 - DNA, 15 bp, Homo sapiens
tatgcattttgttgt

SEQ ID NO: 1907849 - DNA, 15 bp, Homo sapiens
atgcattttgttgtt

SEQ ID NO: 1907850 - DNA, 15 bp, Homo sapiens
tgcattttgttgttg

SEQ ID NO: 1907851 - DNA, 15 bp, Homo sapiens
gcattttgttgttga

SEQ ID NO: 1907852 - DNA, 15 bp, Homo sapiens
cattttgttgttgac

SEQ ID NO: 1907853 - DNA, 15 bp, Homo sapiens
attttgttgttgacc

SEQ ID NO: 1907854 - DNA, 15 bp, Homo sapiens
ttttgttgttgaccg

SEQ ID NO: 1907855 - DNA, 15 bp, Homo sapiens
tttgttgttgaccga

SEQ ID NO: 1907856 - DNA, 15 bp, Homo sapiens
ttgttgttgaccgaa

SEQ ID NO: 1907857 - DNA, 15 bp, Homo sapiens
tgttgttgaccgaaa

SEQ ID NO: 1907858 - DNA, 15 bp, Homo sapiens
gttgttgaccgaaac

SEQ ID NO: 1907859 - DNA, 15 bp, Homo sapiens
ttgttgaccgaaacg

SEQ ID NO: 1907860 - DNA, 15 bp, Homo sapiens
tgttgaccgaaacgt

SEQ ID NO: 1907861 - DNA, 15 bp, Homo sapiens
gttgaccgaaacgtc

SEQ ID NO: 1907862 - DNA, 15 bp, Homo sapiens
ttgaccgaaacgtcg

SEQ ID NO: 1907863 - DNA, 15 bp, Homo sapiens
tgaccgaaacgtcgt

SEQ ID NO: 1907864 - DNA, 15 bp, Homo sapiens
gaccgaaacgtcgtt

SEQ ID NO: 1907865 - DNA, 15 bp, Homo sapiens
accgaaacgtcgtta

SEQ ID NO: 1907866 - DNA, 15 bp, Homo sapiens
ccgaaacgtcgttat

SEQ ID NO: 1907867 - DNA, 15 bp, Homo sapiens
cgaaacgtcgttata

SEQ ID NO: 1907868 - DNA, 15 bp, Homo sapiens
gaaacgtcgttatat

SEQ ID NO: 1907869 - DNA, 15 bp, Homo sapiens
aaacgtcgttatata

SEQ ID NO: 1907870 - DNA, 15 bp, Homo sapiens
aacgtcgttatatat

SEQ ID NO: 1907871 - DNA, 15 bp, Homo sapiens
acgtcgttatatatt

SEQ ID NO: 1907872 - DNA, 15 bp, Homo sapiens
cgtcgttatatattc

SEQ ID NO: 1907873 - DNA, 15 bp, Homo sapiens
gtcgttatatattct

SEQ ID NO: 1907874 - DNA, 15 bp, Homo sapiens
tcgttatatattctt

SEQ ID NO: 1907875 - DNA, 15 bp, Homo sapiens
cgttatatattcttt

SEQ ID NO: 1907876 - DNA, 15 bp, Homo sapiens
gttatatattctttc

SEQ ID NO: 1907877 - DNA, 15 bp, Homo sapiens
ttatatattctttcc

SEQ ID NO: 1907878 - DNA, 15 bp, Homo sapiens
tatatattctttcca

SEQ ID NO: 1907879 - DNA, 15 bp, Homo sapiens
atatattctttccat

SEQ ID NO: 1907880 - DNA, 15 bp, Homo sapiens
tatattctttccata

SEQ ID NO: 1907881 - DNA, 15 bp, Homo sapiens
atattctttccatac

SEQ ID NO: 1907882 - DNA, 15 bp, Homo sapiens
tattctttccataca

SEQ ID NO: 1907883 - DNA, 15 bp, Homo sapiens
attctttccatacat

SEQ ID NO: 1907884 - DNA, 15 bp, Homo sapiens
ttctttccatacata

SEQ ID NO: 1907885 - DNA, 15 bp, Homo sapiens
tctttccatacatag

SEQ ID NO: 1907886 - DNA, 15 bp, Homo sapiens
ctttccatacatagc

SEQ ID NO: 1907887 - DNA, 15 bp, Homo sapiens
tttccatacatagca

SEQ ID NO: 1907888 - DNA, 15 bp, Homo sapiens
ttccatacatagcat

SEQ ID NO: 1907889 - DNA, 15 bp, Homo sapiens
tccatacatagcatg

SEQ ID NO: 1907890 - DNA, 15 bp, Homo sapiens
ccatacatagcatgt

SEQ ID NO: 1907891 - DNA, 15 bp, Homo sapiens
catacatagcatgtg

SEQ ID NO: 1907892 - DNA, 15 bp, Homo sapiens
atacatagcatgtgg

SEQ ID NO: 1907893 - DNA, 15 bp, Homo sapiens
acatagcatgtggaa

SEQ ID NO: 1907894 - DNA, 15 bp, Homo sapiens
catagcatgtggaaa

SEQ ID NO: 1907895 - DNA, 15 bp, Homo sapiens
atagcatgtggaaag

SEQ ID NO: 1907896 - DNA, 15 bp, Homo sapiens
tagcatgtggaaaga

SEQ ID NO: 1907897 - DNA, 15 bp, Homo sapiens
agcatgtggaaagaa

SEQ ID NO: 1907898 - DNA, 15 bp, Homo sapiens
gcatgtggaaagaat

SEQ ID NO: 1907899 - DNA, 15 bp, Homo sapiens
catgtggaaagaata

SEQ ID NO: 1907900 - DNA, 15 bp, Homo sapiens
atgtggaaagaatag

SEQ ID NO: 1907901 - DNA, 15 bp, Homo sapiens
tgtggaaagaataga

SEQ ID NO: 1907902 - DNA, 15 bp, Homo sapiens
gtggaaagaatagat

SEQ ID NO: 1907903 - DNA, 15 bp, Homo sapiens
tggaaagaatagatc

SEQ ID NO: 1907904 - DNA, 15 bp, Homo sapiens
ggaaagaatagatct

SEQ ID NO: 1907905 - DNA, 15 bp, Homo sapiens
gaaagaatagatctc

SEQ ID NO: 1907906 - DNA, 15 bp, Homo sapiens
aaagaatagatctct

SEQ ID NO: 1907907 - DNA, 15 bp, Homo sapiens
aagaatagatctctt

SEQ ID NO: 1907908 - DNA, 15 bp, Homo sapiens
agaatagatctcttt

SEQ ID NO: 1907909 - DNA, 15 bp, Homo sapiens
gaatagatctctttt

SEQ ID NO: 1907910 - DNA, 15 bp, Homo sapiens
aatagatctcttttt

SEQ ID NO: 1907911 - DNA, 15 bp, Homo sapiens
atagatctctttttt

SEQ ID NO: 1907912 - DNA, 15 bp, Homo sapiens
tagatctcttttttt

SEQ ID NO: 1907913 - DNA, 15 bp, Homo sapiens
agatctctttttttt

SEQ ID NO: 1907914 - DNA, 15 bp, Homo sapiens
gatctctttttttta

SEQ ID NO: 1907915 - DNA, 15 bp, Homo sapiens
atctcttttttttaa

SEQ ID NO: 1907916 - DNA, 15 bp, Homo sapiens
tctcttttttttaat

SEQ ID NO: 1907917 - DNA, 15 bp, Homo sapiens
ctcttttttttaatt

SEQ ID NO: 1907918 - DNA, 15 bp, Homo sapiens
tcttttttttaattg

SEQ ID NO: 1907919 - DNA, 15 bp, Homo sapiens
cttttttttaattgt

SEQ ID NO: 1907920 - DNA, 15 bp, Homo sapiens
ttttttttaattgtt

SEQ ID NO: 1907921 - DNA, 15 bp, Homo sapiens
tttttttaattgttc

SEQ ID NO: 1907922 - DNA, 15 bp, Homo sapiens
ttttttaattgttcc

SEQ ID NO: 1907923 - DNA, 15 bp, Homo sapiens
tttttaattgttcca

SEQ ID NO: 1907924 - DNA, 15 bp, Homo sapiens
ttttaattgttccac

SEQ ID NO: 1907925 - DNA, 15 bp, Homo sapiens
tttaattgttccaca

SEQ ID NO: 1907926 - DNA, 15 bp, Homo sapiens
ttaattgttccacac

SEQ ID NO: 1907927 - DNA, 15 bp, Homo sapiens
taattgttccacact

SEQ ID NO: 1907928 - DNA, 15 bp, Homo sapiens
aattgttccacactt

SEQ ID NO: 1907929 - DNA, 15 bp, Homo sapiens
attgttccacacttt

SEQ ID NO: 1907930 - DNA, 15 bp, Homo sapiens
ttgttccacacttta

SEQ ID NO: 1907931 - DNA, 15 bp, Homo sapiens
tgttccacactttac

SEQ ID NO: 1907932 - DNA, 15 bp, Homo sapiens
gttccacactttacc

SEQ ID NO: 1907933 - DNA, 15 bp, Homo sapiens
ttccacactttacca

SEQ ID NO: 1907934 - DNA, 15 bp, Homo sapiens
tccacactttaccat

SEQ ID NO: 1907935 - DNA, 15 bp, Homo sapiens
ccacactttaccata

SEQ ID NO: 1907936 - DNA, 15 bp, Homo sapiens
cacactttaccatat

SEQ ID NO: 1907937 - DNA, 15 bp, Homo sapiens
acactttaccatata

SEQ ID NO: 1907938 - DNA, 15 bp, Homo sapiens
cactttaccatataa

SEQ ID NO: 1907939 - DNA, 15 bp, Homo sapiens
actttaccatataat

SEQ ID NO: 1907940 - DNA, 15 bp, Homo sapiens
ctttaccatataatg

SEQ ID NO: 1907941 - DNA, 15 bp, Homo sapiens
tttaccatataatgg

SEQ ID NO: 1907942 - DNA, 15 bp, Homo sapiens
ttaccatataatgga

SEQ ID NO: 1907943 - DNA, 15 bp, Homo sapiens
taccatataatggaa

SEQ ID NO: 1907944 - DNA, 15 bp, Homo sapiens
accatataatggaat

SEQ ID NO: 1907945 - DNA, 15 bp, Homo sapiens
ccatataatggaata

SEQ ID NO: 1907946 - DNA, 15 bp, Homo sapiens
catataatggaatac

SEQ ID NO: 1907947 - DNA, 15 bp, Homo sapiens
atataatggaatacg

SEQ ID NO: 1907948 - DNA, 15 bp, Homo sapiens
tataatggaatacgc

SEQ ID NO: 1907949 - DNA, 15 bp, Homo sapiens
ataatggaatacgca

SEQ ID NO: 1907950 - DNA, 15 bp, Homo sapiens
taatggaatacgcaa

SEQ ID NO: 1907951 - DNA, 15 bp, Homo sapiens
aatggaatacgcaaa

SEQ ID NO: 1907952 - DNA, 15 bp, Homo sapiens
atggaatacgcaaaa

SEQ ID NO: 1907953 - DNA, 15 bp, Homo sapiens
tggaatacgcaaaat

SEQ ID NO: 1907954 - DNA, 15 bp, Homo sapiens
ggaatacgcaaaatt

SEQ ID NO: 1907955 - DNA, 15 bp, Homo sapiens
gaatacgcaaaattt

SEQ ID NO: 1907956 - DNA, 15 bp, Homo sapiens
aatacgcaaaatttc

SEQ ID NO: 1907957 - DNA, 15 bp, Homo sapiens
atacgcaaaatttca

SEQ ID NO: 1907958 - DNA, 15 bp, Homo sapiens
tacgcaaaatttcac

SEQ ID NO: 1907959 - DNA, 15 bp, Homo sapiens
acgcaaaatttcaca

SEQ ID NO: 1907960 - DNA, 15 bp, Homo sapiens
cgcaaaatttcacaa

SEQ ID NO: 1907961 - DNA, 15 bp, Homo sapiens
gcaaaatttcacaat

SEQ ID NO: 1907962 - DNA, 15 bp, Homo sapiens
caaaatttcacaata

SEQ ID NO: 1907963 - DNA, 15 bp, Homo sapiens
aaaatttcacaatac

SEQ ID NO: 1907964 - DNA, 15 bp, Homo sapiens
aaatttcacaatacc

SEQ ID NO: 1907965 - DNA, 15 bp, Homo sapiens
aatttcacaatacct

SEQ ID NO: 1907966 - DNA, 15 bp, Homo sapiens
atttcacaatacctt

SEQ ID NO: 1907967 - DNA, 15 bp, Homo sapiens
tttcacaataccttt

SEQ ID NO: 1907968 - DNA, 15 bp, Homo sapiens
ttcacaatacctttc

SEQ ID NO: 1907969 - DNA, 15 bp, Homo sapiens
tcacaatacctttca

SEQ ID NO: 1907970 - DNA, 15 bp, Homo sapiens
cacaatacctttcag

SEQ ID NO: 1907971 - DNA, 15 bp, Homo sapiens
acaatacctttcagg

SEQ ID NO: 1907972 - DNA, 15 bp, Homo sapiens
caatacctttcagga

SEQ ID NO: 1907973 - DNA, 15 bp, Homo sapiens
aatacctttcaggat

SEQ ID NO: 1907974 - DNA, 15 bp, Homo sapiens
atacctttcaggatg

SEQ ID NO: 1907975 - DNA, 15 bp, Homo sapiens
tacctttcaggatgt

SEQ ID NO: 1907976 - DNA, 15 bp, Homo sapiens
acctttcaggatgta

SEQ ID NO: 1907977 - DNA, 15 bp, Homo sapiens
cctttcaggatgtaa

SEQ ID NO: 1907978 - DNA, 15 bp, Homo sapiens
ctttcaggatgtaaa

SEQ ID NO: 1907979 - DNA, 15 bp, Homo sapiens
tttcaggatgtaaaa

SEQ ID NO: 1907980 - DNA, 15 bp, Homo sapiens
ttcaggatgtaaaat

SEQ ID NO: 1907981 - DNA, 15 bp, Homo sapiens
tcaggatgtaaaata

SEQ ID NO: 1907982 - DNA, 15 bp, Homo sapiens
caggatgtaaaatac

SEQ ID NO: 1907983 - DNA, 15 bp, Homo sapiens
aggatgtaaaataca

SEQ ID NO: 1907984 - DNA, 15 bp, Homo sapiens
ggatgtaaaatacat

SEQ ID NO: 1907985 - DNA, 15 bp, Homo sapiens
gatgtaaaatacata

SEQ ID NO: 1907986 - DNA, 15 bp, Homo sapiens
atgtaaaatacatat

SEQ ID NO: 1907987 - DNA, 15 bp, Homo sapiens
tgtaaaatacatata

SEQ ID NO: 1907988 - DNA, 15 bp, Homo sapiens
gtaaaatacatatac

SEQ ID NO: 1907989 - DNA, 15 bp, Homo sapiens
taaaatacatatacc

SEQ ID NO: 1907990 - DNA, 15 bp, Homo sapiens
aaaatacatataccc

SEQ ID NO: 1907991 - DNA, 15 bp, Homo sapiens
aaatacatataccct

SEQ ID NO: 1907992 - DNA, 15 bp, Homo sapiens
aatacatataccctt

SEQ ID NO: 1907993 - DNA, 15 bp, Homo sapiens
tacatataccctttg

SEQ ID NO: 1907994 - DNA, 15 bp, Homo sapiens
acatataccctttga

SEQ ID NO: 1907995 - DNA, 15 bp, Homo sapiens
catataccctttgac

SEQ ID NO: 1907996 - DNA, 15 bp, Homo sapiens
atataccctttgacg

SEQ ID NO: 1907997 - DNA, 15 bp, Homo sapiens
tataccctttgacga

SEQ ID NO: 1907998 - DNA, 15 bp, Homo sapiens
ataccctttgacgac

SEQ ID NO: 1907999 - DNA, 15 bp, Homo sapiens
taccctttgacgaca

SEQ ID NO: 1908000 - DNA, 15 bp, Homo sapiens
accctttgacgacat

SEQ ID NO: 1908001 - DNA, 15 bp, Homo sapiens
ccctttgacgacatt

SEQ ID NO: 1908002 - DNA, 15 bp, Homo sapiens
cctttgacgacatta

SEQ ID NO: 1908003 - DNA, 15 bp, Homo sapiens
ctttgacgacattag

SEQ ID NO: 1908004 - DNA, 15 bp, Homo sapiens
tttgacgacattaga

SEQ ID NO: 1908005 - DNA, 15 bp, Homo sapiens
ttgacgacattagaa

SEQ ID NO: 1908006 - DNA, 15 bp, Homo sapiens
tgacgacattagaaa

SEQ ID NO: 1908007 - DNA, 15 bp, Homo sapiens
gacgacattagaaaa

SEQ ID NO: 1908008 - DNA, 15 bp, Homo sapiens
acgacattagaaaag

SEQ ID NO: 1908009 - DNA, 15 bp, Homo sapiens
cgacattagaaaaga

SEQ ID NO: 1908010 - DNA, 15 bp, Homo sapiens
gacattagaaaagag

SEQ ID NO: 1908011 - DNA, 15 bp, Homo sapiens
acattagaaaagaga

SEQ ID NO: 1908012 - DNA, 15 bp, Homo sapiens
cattagaaaagagaa

SEQ ID NO: 1908013 - DNA, 15 bp, Homo sapiens
attagaaaagagaaa

SEQ ID NO: 1908014 - DNA, 15 bp, Homo sapiens
ttagaaaagagaaaa

SEQ ID NO: 1908015 - DNA, 15 bp, Homo sapiens
tagaaaagagaaaat

SEQ ID NO: 1908016 - DNA, 15 bp, Homo sapiens
agaaaagagaaaatg

SEQ ID NO: 1908017 - DNA, 15 bp, Homo sapiens
gaaaagagaaaatgt

SEQ ID NO: 1908018 - DNA, 15 bp, Homo sapiens
aaaagagaaaatgtg

SEQ ID NO: 1908019 - DNA, 15 bp, Homo sapiens
aaagagaaaatgtgg

SEQ ID NO: 1908020 - DNA, 15 bp, Homo sapiens
aagagaaaatgtggg

SEQ ID NO: 1908021 - DNA, 15 bp, Homo sapiens
agagaaaatgtgggc

SEQ ID NO: 1908022 - DNA, 15 bp, Homo sapiens
gagaaaatgtgggcc

SEQ ID NO: 1908023 - DNA, 15 bp, Homo sapiens
agaaaatgtgggccg

SEQ ID NO: 1908024 - DNA, 15 bp, Homo sapiens
gaaaatgtgggccgg

SEQ ID NO: 1908025 - DNA, 15 bp, Homo sapiens
aaaatgtgggccggg

SEQ ID NO: 1908026 - DNA, 15 bp, Homo sapiens
aaatgtgggccgggc

SEQ ID NO: 1908027 - DNA, 15 bp, Homo sapiens
aatgtgggccgggcg

SEQ ID NO: 1908028 - DNA, 15 bp, Homo sapiens
atgtgggccgggcgc

SEQ ID NO: 1908029 - DNA, 15 bp, Homo sapiens
tgtgggccgggcgcg

SEQ ID NO: 1908030 - DNA, 15 bp, Homo sapiens
gtgggccgggcgcgg

SEQ ID NO: 1908031 - DNA, 15 bp, Homo sapiens
tgggccgggcgcggt

SEQ ID NO: 1908032 - DNA, 15 bp, Homo sapiens
gagaccatcctgggt

SEQ ID NO: 1908033 - DNA, 15 bp, Homo sapiens
agaccatcctgggta

SEQ ID NO: 1908034 - DNA, 15 bp, Homo sapiens
gaccatcctgggtaa

SEQ ID NO: 1908035 - DNA, 15 bp, Homo sapiens
accatcctgggtaac

SEQ ID NO: 1908036 - DNA, 15 bp, Homo sapiens
ccatcctgggtaaca

SEQ ID NO: 1908037 - DNA, 15 bp, Homo sapiens
catcctgggtaacac

SEQ ID NO: 1908038 - DNA, 15 bp, Homo sapiens
atcctgggtaacacg

SEQ ID NO: 1908039 - DNA, 15 bp, Homo sapiens
tcctgggtaacacgg

SEQ ID NO: 1908040 - DNA, 15 bp, Homo sapiens
cctgggtaacacggt

SEQ ID NO: 1908041 - DNA, 15 bp, Homo sapiens
ctgggtaacacggtg

SEQ ID NO: 1908042 - DNA, 15 bp, Homo sapiens
tgggtaacacggtga

SEQ ID NO: 1908043 - DNA, 15 bp, Homo sapiens
gggtaacacggtgaa

SEQ ID NO: 1908044 - DNA, 15 bp, Homo sapiens
ggtaacacggtgaaa

SEQ ID NO: 1908045 - DNA, 15 bp, Homo sapiens
gtaacacggtgaaac

SEQ ID NO: 1908046 - DNA, 15 bp, Homo sapiens
atacaaaaaaactag

SEQ ID NO: 1908047 - DNA, 15 bp, Homo sapiens
tacaaaaaaactagc

SEQ ID NO: 1908048 - DNA, 15 bp, Homo sapiens
acaaaaaaactagct

SEQ ID NO: 1908049 - DNA, 15 bp, Homo sapiens
caaaaaaactagctg

SEQ ID NO: 1908050 - DNA, 15 bp, Homo sapiens
aaaaaaactagctgg

SEQ ID NO: 1908051 - DNA, 15 bp, Homo sapiens
aaaaactagctgggc

SEQ ID NO: 1908052 - DNA, 15 bp, Homo sapiens
aaaactagctgggcg

SEQ ID NO: 1908053 - DNA, 15 bp, Homo sapiens
aaactagctgggcgt

SEQ ID NO: 1908054 - DNA, 15 bp, Homo sapiens
aactagctgggcgtg

SEQ ID NO: 1908055 - DNA, 15 bp, Homo sapiens
actagctgggcgtgg

SEQ ID NO: 1908056 - DNA, 15 bp, Homo sapiens
ctagctgggcgtggt

SEQ ID NO: 1908057 - DNA, 15 bp, Homo sapiens
atgaacctgggaggt

SEQ ID NO: 1908058 - DNA, 15 bp, Homo sapiens
cctgggaggtggagt

SEQ ID NO: 1908059 - DNA, 15 bp, Homo sapiens
ctgggaggtggagtt

SEQ ID NO: 1908060 - DNA, 15 bp, Homo sapiens
tgggaggtggagttt

SEQ ID NO: 1908061 - DNA, 15 bp, Homo sapiens
gagtttgcagtgagc

SEQ ID NO: 1908062 - DNA, 15 bp, Homo sapiens
cctgggcgacagaga

SEQ ID NO: 1908063 - DNA, 15 bp, Homo sapiens
ctgggcgacagagac

SEQ ID NO: 1908064 - DNA, 15 bp, Homo sapiens
tgggcgacagagact

SEQ ID NO: 1908065 - DNA, 15 bp, Homo sapiens
gggcgacagagactc

SEQ ID NO: 1908066 - DNA, 15 bp, Homo sapiens
ggcgacagagactcc

SEQ ID NO: 1908067 - DNA, 15 bp, Homo sapiens
gcgacagagactcca

SEQ ID NO: 1908068 - DNA, 15 bp, Homo sapiens
cgacagagactccat

SEQ ID NO: 1908069 - DNA, 15 bp, Homo sapiens
gacagagactccatc

SEQ ID NO: 1908070 - DNA, 15 bp, Homo sapiens
acagagactccatct

SEQ ID NO: 1908071 - DNA, 15 bp, Homo sapiens
cagagactccatctc

SEQ ID NO: 1908072 - DNA, 15 bp, Homo sapiens
aagaaaagaaaagag

SEQ ID NO: 1908073 - DNA, 15 bp, Homo sapiens
agaaaagaaaagaga

SEQ ID NO: 1908074 - DNA, 15 bp, Homo sapiens
gaaaagaaaagagaa

SEQ ID NO: 1908075 - DNA, 15 bp, Homo sapiens
aaaagaaaagagaaa

SEQ ID NO: 1908076 - DNA, 15 bp, Homo sapiens
aaagaaaagagaaaa

SEQ ID NO: 1908077 - DNA, 15 bp, Homo sapiens
aagaaaagagaaaat

SEQ ID NO: 1908078 - DNA, 15 bp, Homo sapiens
aagagaaaatgtggc

SEQ ID NO: 1908079 - DNA, 15 bp, Homo sapiens
agagaaaatgtggct

SEQ ID NO: 1908080 - DNA, 15 bp, Homo sapiens
gagaaaatgtggctg

SEQ ID NO: 1908081 - DNA, 15 bp, Homo sapiens
agaaaatgtggctgg

SEQ ID NO: 1908082 - DNA, 15 bp, Homo sapiens
gaaaatgtggctggg

SEQ ID NO: 1908083 - DNA, 15 bp, Homo sapiens
aaaatgtggctgggc

SEQ ID NO: 1908084 - DNA, 15 bp, Homo sapiens
aaatgtggctgggcg

SEQ ID NO: 1908085 - DNA, 15 bp, Homo sapiens
aatgtggctgggcgc

SEQ ID NO: 1908086 - DNA, 15 bp, Homo sapiens
atgtggctgggcgcg

SEQ ID NO: 1908087 - DNA, 15 bp, Homo sapiens
tgtggctgggcgcgg

SEQ ID NO: 1908088 - DNA, 15 bp, Homo sapiens
gtggctgggcgcggt

SEQ ID NO: 1908089 - DNA, 15 bp, Homo sapiens
atcacctgaggtcga

SEQ ID NO: 1908090 - DNA, 15 bp, Homo sapiens
tgaggtcgagagttc

SEQ ID NO: 1908091 - DNA, 15 bp, Homo sapiens
gaggtcgagagttcg

SEQ ID NO: 1908092 - DNA, 15 bp, Homo sapiens
aggtcgagagttcga

SEQ ID NO: 1908093 - DNA, 15 bp, Homo sapiens
ggtcgagagttcgaa

SEQ ID NO: 1908094 - DNA, 15 bp, Homo sapiens
gtcgagagttcgaaa

SEQ ID NO: 1908095 - DNA, 15 bp, Homo sapiens
tcgagagttcgaaac

SEQ ID NO: 1908096 - DNA, 15 bp, Homo sapiens
cgagagttcgaaacc

SEQ ID NO: 1908097 - DNA, 15 bp, Homo sapiens
gagagttcgaaacca

SEQ ID NO: 1908098 - DNA, 15 bp, Homo sapiens
agagttcgaaaccag

SEQ ID NO: 1908099 - DNA, 15 bp, Homo sapiens
gagttcgaaaccagc

SEQ ID NO: 1908100 - DNA, 15 bp, Homo sapiens
gttcgaaaccagccc

SEQ ID NO: 1908101 - DNA, 15 bp, Homo sapiens
ttcgaaaccagcccg

SEQ ID NO: 1908102 - DNA, 15 bp, Homo sapiens
tcgaaaccagcccga

SEQ ID NO: 1908103 - DNA, 15 bp, Homo sapiens
cgaaaccagcccgac

SEQ ID NO: 1908104 - DNA, 15 bp, Homo sapiens
gaaaccagcccgacc

SEQ ID NO: 1908105 - DNA, 15 bp, Homo sapiens
aaaccagcccgacca

SEQ ID NO: 1908106 - DNA, 15 bp, Homo sapiens
aaccagcccgaccaa

SEQ ID NO: 1908107 - DNA, 15 bp, Homo sapiens
accagcccgaccaac

SEQ ID NO: 1908108 - DNA, 15 bp, Homo sapiens
ccagcccgaccaaca

SEQ ID NO: 1908109 - DNA, 15 bp, Homo sapiens
cagcccgaccaacat

SEQ ID NO: 1908110 - DNA, 15 bp, Homo sapiens
agcccgaccaacatg

SEQ ID NO: 1908111 - DNA, 15 bp, Homo sapiens
gcccgaccaacatgg

SEQ ID NO: 1908112 - DNA, 15 bp, Homo sapiens
cccgaccaacatgga

SEQ ID NO: 1908113 - DNA, 15 bp, Homo sapiens
ccgaccaacatggag

SEQ ID NO: 1908114 - DNA, 15 bp, Homo sapiens
cgaccaacatggaga

SEQ ID NO: 1908115 - DNA, 15 bp, Homo sapiens
aaccttgtctctact

SEQ ID NO: 1908116 - DNA, 15 bp, Homo sapiens
accttgtctctacta

SEQ ID NO: 1908117 - DNA, 15 bp, Homo sapiens
ccttgtctctactaa

SEQ ID NO: 1908118 - DNA, 15 bp, Homo sapiens
cttgtctctactaaa

SEQ ID NO: 1908119 - DNA, 15 bp, Homo sapiens
ttgtctctactaaaa

SEQ ID NO: 1908120 - DNA, 15 bp, Homo sapiens
attagccaggtgtgt

SEQ ID NO: 1908121 - DNA, 15 bp, Homo sapiens
ttagccaggtgtgtt

SEQ ID NO: 1908122 - DNA, 15 bp, Homo sapiens
tagccaggtgtgttg

SEQ ID NO: 1908123 - DNA, 15 bp, Homo sapiens
agccaggtgtgttgg

SEQ ID NO: 1908124 - DNA, 15 bp, Homo sapiens
gccaggtgtgttggc

SEQ ID NO: 1908125 - DNA, 15 bp, Homo sapiens
ggtgtgttggcgcat

SEQ ID NO: 1908126 - DNA, 15 bp, Homo sapiens
gtgtgttggcgcatg

SEQ ID NO: 1908127 - DNA, 15 bp, Homo sapiens
tgtgttggcgcatgc

SEQ ID NO: 1908128 - DNA, 15 bp, Homo sapiens
gtgttggcgcatgcc

SEQ ID NO: 1908129 - DNA, 15 bp, Homo sapiens
tgttggcgcatgccc

SEQ ID NO: 1908130 - DNA, 15 bp, Homo sapiens
gttggcgcatgcccg

SEQ ID NO: 1908131 - DNA, 15 bp, Homo sapiens
ttggcgcatgcccgt

SEQ ID NO: 1908132 - DNA, 15 bp, Homo sapiens
tggcgcatgcccgta

SEQ ID NO: 1908133 - DNA, 15 bp, Homo sapiens
ggcgcatgcccgtaa

SEQ ID NO: 1908134 - DNA, 15 bp, Homo sapiens
gcgcatgcccgtaat

SEQ ID NO: 1908135 - DNA, 15 bp, Homo sapiens
cgcatgcccgtaatc

SEQ ID NO: 1908136 - DNA, 15 bp, Homo sapiens
gcatgcccgtaatcc

SEQ ID NO: 1908137 - DNA, 15 bp, Homo sapiens
catgcccgtaatccc

SEQ ID NO: 1908138 - DNA, 15 bp, Homo sapiens
atgcccgtaatccca

SEQ ID NO: 1908139 - DNA, 15 bp, Homo sapiens
tgcccgtaatcccag

SEQ ID NO: 1908140 - DNA, 15 bp, Homo sapiens
gcccgtaatcccagc

SEQ ID NO: 1908141 - DNA, 15 bp, Homo sapiens
cccgtaatcccagct

SEQ ID NO: 1908142 - DNA, 15 bp, Homo sapiens
ccgtaatcccagcta

SEQ ID NO: 1908143 - DNA, 15 bp, Homo sapiens
cgtaatcccagctac

SEQ ID NO: 1908144 - DNA, 15 bp, Homo sapiens
gtaatcccagctaca

SEQ ID NO: 1908145 - DNA, 15 bp, Homo sapiens
taatcccagctacac

SEQ ID NO: 1908146 - DNA, 15 bp, Homo sapiens
aatcccagctacacg

SEQ ID NO: 1908147 - DNA, 15 bp, Homo sapiens
atcccagctacacgg

SEQ ID NO: 1908148 - DNA, 15 bp, Homo sapiens
tcccagctacacggg

SEQ ID NO: 1908149 - DNA, 15 bp, Homo sapiens
cccagctacacggga

SEQ ID NO: 1908150 - DNA, 15 bp, Homo sapiens
ccagctacacgggag

SEQ ID NO: 1908151 - DNA, 15 bp, Homo sapiens
cagctacacgggagg

SEQ ID NO: 1908152 - DNA, 15 bp, Homo sapiens
agctacacgggaggc

SEQ ID NO: 1908153 - DNA, 15 bp, Homo sapiens
gctacacgggaggct

SEQ ID NO: 1908154 - DNA, 15 bp, Homo sapiens
ctacacgggaggctg

SEQ ID NO: 1908155 - DNA, 15 bp, Homo sapiens
tacacgggaggctga

SEQ ID NO: 1908156 - DNA, 15 bp, Homo sapiens
acacgggaggctgag

SEQ ID NO: 1908157 - DNA, 15 bp, Homo sapiens
cacgggaggctgagg

SEQ ID NO: 1908158 - DNA, 15 bp, Homo sapiens
acgggaggctgaggc

SEQ ID NO: 1908159 - DNA, 15 bp, Homo sapiens
ccgagatcacaccat

SEQ ID NO: 1908160 - DNA, 15 bp, Homo sapiens
ctgggcaacaagagc

SEQ ID NO: 1908161 - DNA, 15 bp, Homo sapiens
acaagagcgaaacta

SEQ ID NO: 1908162 - DNA, 15 bp, Homo sapiens
caagagcgaaactat

SEQ ID NO: 1908163 - DNA, 15 bp, Homo sapiens
aagagcgaaactatc

SEQ ID NO: 1908164 - DNA, 15 bp, Homo sapiens
agagcgaaactatct

SEQ ID NO: 1908165 - DNA, 15 bp, Homo sapiens
gagcgaaactatctc

SEQ ID NO: 1908166 - DNA, 15 bp, Homo sapiens
agcgaaactatctca

SEQ ID NO: 1908167 - DNA, 15 bp, Homo sapiens
gcgaaactatctcaa

SEQ ID NO: 1908168 - DNA, 15 bp, Homo sapiens
cgaaactatctcaaa

SEQ ID NO: 1908169 - DNA, 15 bp, Homo sapiens
gaaactatctcaaaa

SEQ ID NO: 1908170 - DNA, 15 bp, Homo sapiens
aaactatctcaaaaa

SEQ ID NO: 1908171 - DNA, 15 bp, Homo sapiens
aactatctcaaaaaa

SEQ ID NO: 1908172 - DNA, 15 bp, Homo sapiens
actatctcaaaaaaa

SEQ ID NO: 1908173 - DNA, 15 bp, Homo sapiens
aagaaaaaagaaaag

SEQ ID NO: 1908174 - DNA, 15 bp, Homo sapiens
agaaaaaagaaaaga

SEQ ID NO: 1908175 - DNA, 15 bp, Homo sapiens
gaaaaaagaaaagat

SEQ ID NO: 1908176 - DNA, 15 bp, Homo sapiens
aaaagaaaagataaa

SEQ ID NO: 1908177 - DNA, 15 bp, Homo sapiens
aaagaaaagataaaa

SEQ ID NO: 1908178 - DNA, 15 bp, Homo sapiens
aagaaaagataaaat

SEQ ID NO: 1908179 - DNA, 15 bp, Homo sapiens
agaaaagataaaatg

SEQ ID NO: 1908180 - DNA, 15 bp, Homo sapiens
gaaaagataaaatgc

SEQ ID NO: 1908181 - DNA, 15 bp, Homo sapiens
aaaagataaaatgca

SEQ ID NO: 1908182 - DNA, 15 bp, Homo sapiens
aaagataaaatgcat

SEQ ID NO: 1908183 - DNA, 15 bp, Homo sapiens
aagataaaatgcatt

SEQ ID NO: 1908184 - DNA, 15 bp, Homo sapiens
agataaaatgcattc

SEQ ID NO: 1908185 - DNA, 15 bp, Homo sapiens
gataaaatgcattct

SEQ ID NO: 1908186 - DNA, 15 bp, Homo sapiens
ataaaatgcattctt

SEQ ID NO: 1908187 - DNA, 15 bp, Homo sapiens
taaaatgcattctta

SEQ ID NO: 1908188 - DNA, 15 bp, Homo sapiens
aaaatgcattcttat

SEQ ID NO: 1908189 - DNA, 15 bp, Homo sapiens
aaatgcattcttatt

SEQ ID NO: 1908190 - DNA, 15 bp, Homo sapiens
aatgcattcttattt

SEQ ID NO: 1908191 - DNA, 15 bp, Homo sapiens
atgcattcttatttt

SEQ ID NO: 1908192 - DNA, 15 bp, Homo sapiens
tgcattcttattttt

SEQ ID NO: 1908193 - DNA, 15 bp, Homo sapiens
gcattcttattttta

SEQ ID NO: 1908194 - DNA, 15 bp, Homo sapiens
cattcttatttttag

SEQ ID NO: 1908195 - DNA, 15 bp, Homo sapiens
attcttatttttagt

SEQ ID NO: 1908196 - DNA, 15 bp, Homo sapiens
ttcttatttttagtt

SEQ ID NO: 1908197 - DNA, 15 bp, Homo sapiens
tcttatttttagttg

SEQ ID NO: 1908198 - DNA, 15 bp, Homo sapiens
cttatttttagttga

SEQ ID NO: 1908199 - DNA, 15 bp, Homo sapiens
ttatttttagttgat

SEQ ID NO: 1908200 - DNA, 15 bp, Homo sapiens
tatttttagttgatg

SEQ ID NO: 1908201 - DNA, 15 bp, Homo sapiens
atttttagttgatgt

SEQ ID NO: 1908202 - DNA, 15 bp, Homo sapiens
tttttagttgatgta

SEQ ID NO: 1908203 - DNA, 15 bp, Homo sapiens
ttttagttgatgtaa

SEQ ID NO: 1908204 - DNA, 15 bp, Homo sapiens
tttagttgatgtaat

SEQ ID NO: 1908205 - DNA, 15 bp, Homo sapiens
ttagttgatgtaatt

SEQ ID NO: 1908206 - DNA, 15 bp, Homo sapiens
tagttgatgtaatta

SEQ ID NO: 1908207 - DNA, 15 bp, Homo sapiens
agttgatgtaattat

SEQ ID NO: 1908208 - DNA, 15 bp, Homo sapiens
gttgatgtaattatg

SEQ ID NO: 1908209 - DNA, 15 bp, Homo sapiens
ttgatgtaattatgt

SEQ ID NO: 1908210 - DNA, 15 bp, Homo sapiens
tgatgtaattatgtg

SEQ ID NO: 1908211 - DNA, 15 bp, Homo sapiens
gatgtaattatgtgg

SEQ ID NO: 1908212 - DNA, 15 bp, Homo sapiens
atgtaattatgtgga

SEQ ID NO: 1908213 - DNA, 15 bp, Homo sapiens
tgtaattatgtggaa

SEQ ID NO: 1908214 - DNA, 15 bp, Homo sapiens
gtaattatgtggaaa

SEQ ID NO: 1908215 - DNA, 15 bp, Homo sapiens
taattatgtggaaat

SEQ ID NO: 1908216 - DNA, 15 bp, Homo sapiens
aattatgtggaaatt

SEQ ID NO: 1908217 - DNA, 15 bp, Homo sapiens
attatgtggaaattt

SEQ ID NO: 1908218 - DNA, 15 bp, Homo sapiens
ttatgtggaaatttc

SEQ ID NO: 1908219 - DNA, 15 bp, Homo sapiens
tatgtggaaatttca

SEQ ID NO: 1908220 - DNA, 15 bp, Homo sapiens
atgtggaaatttcat

SEQ ID NO: 1908221 - DNA, 15 bp, Homo sapiens
tgtggaaatttcatg

SEQ ID NO: 1908222 - DNA, 15 bp, Homo sapiens
gtggaaatttcatga

SEQ ID NO: 1908223 - DNA, 15 bp, Homo sapiens
tggaaatttcatgag

SEQ ID NO: 1908224 - DNA, 15 bp, Homo sapiens
ggaaatttcatgagg

SEQ ID NO: 1908225 - DNA, 15 bp, Homo sapiens
gaaatttcatgagga

SEQ ID NO: 1908226 - DNA, 15 bp, Homo sapiens
aaatttcatgaggat

SEQ ID NO: 1908227 - DNA, 15 bp, Homo sapiens
aatttcatgaggatg

SEQ ID NO: 1908228 - DNA, 15 bp, Homo sapiens
atttcatgaggatgc

SEQ ID NO: 1908229 - DNA, 15 bp, Homo sapiens
tttcatgaggatgca

SEQ ID NO: 1908230 - DNA, 15 bp, Homo sapiens
ttcatgaggatgcac

SEQ ID NO: 1908231 - DNA, 15 bp, Homo sapiens
tcatgaggatgcact

SEQ ID NO: 1908232 - DNA, 15 bp, Homo sapiens
catgaggatgcactg

SEQ ID NO: 1908233 - DNA, 15 bp, Homo sapiens
atgaggatgcactgg

SEQ ID NO: 1908234 - DNA, 15 bp, Homo sapiens
tgaggatgcactgga

SEQ ID NO: 1908235 - DNA, 15 bp, Homo sapiens
gaggatgcactggaa

SEQ ID NO: 1908236 - DNA, 15 bp, Homo sapiens
aggatgcactggaaa

SEQ ID NO: 1908237 - DNA, 15 bp, Homo sapiens
ggatgcactggaaaa

SEQ ID NO: 1908238 - DNA, 15 bp, Homo sapiens
gatgcactggaaaat

SEQ ID NO: 1908239 - DNA, 15 bp, Homo sapiens
atgcactggaaaata

SEQ ID NO: 1908240 - DNA, 15 bp, Homo sapiens
tgcactggaaaataa

SEQ ID NO: 1908241 - DNA, 15 bp, Homo sapiens
gcactggaaaataat

SEQ ID NO: 1908242 - DNA, 15 bp, Homo sapiens
cactggaaaataatg

SEQ ID NO: 1908243 - DNA, 15 bp, Homo sapiens
actggaaaataatga

SEQ ID NO: 1908244 - DNA, 15 bp, Homo sapiens
ctggaaaataatgaa

SEQ ID NO: 1908245 - DNA, 15 bp, Homo sapiens
tggaaaataatgaaa

SEQ ID NO: 1908246 - DNA, 15 bp, Homo sapiens
ggaaaataatgaaat

SEQ ID NO: 1908247 - DNA, 15 bp, Homo sapiens
gaaaataatgaaata

SEQ ID NO: 1908248 - DNA, 15 bp, Homo sapiens
aaaataatgaaataa

SEQ ID NO: 1908249 - DNA, 15 bp, Homo sapiens
aaataatgaaataag

SEQ ID NO: 1908250 - DNA, 15 bp, Homo sapiens
aataatgaaataagg

SEQ ID NO: 1908251 - DNA, 15 bp, Homo sapiens
ataatgaaataaggg

SEQ ID NO: 1908252 - DNA, 15 bp, Homo sapiens
taatgaaataaggga

SEQ ID NO: 1908253 - DNA, 15 bp, Homo sapiens
aatgaaataagggag

SEQ ID NO: 1908254 - DNA, 15 bp, Homo sapiens
atgaaataagggagt

SEQ ID NO: 1908255 - DNA, 15 bp, Homo sapiens
tgaaataagggagtt

SEQ ID NO: 1908256 - DNA, 15 bp, Homo sapiens
gaaataagggagttg

SEQ ID NO: 1908257 - DNA, 15 bp, Homo sapiens
aaataagggagttga

SEQ ID NO: 1908258 - DNA, 15 bp, Homo sapiens
aataagggagttgac

SEQ ID NO: 1908259 - DNA, 15 bp, Homo sapiens
ataagggagttgacg

SEQ ID NO: 1908260 - DNA, 15 bp, Homo sapiens
taagggagttgacga

SEQ ID NO: 1908261 - DNA, 15 bp, Homo sapiens
aagggagttgacgaa

SEQ ID NO: 1908262 - DNA, 15 bp, Homo sapiens
agggagttgacgaag

SEQ ID NO: 1908263 - DNA, 15 bp, Homo sapiens
gggagttgacgaagg

SEQ ID NO: 1908264 - DNA, 15 bp, Homo sapiens
ggagttgacgaaggt

SEQ ID NO: 1908265 - DNA, 15 bp, Homo sapiens
gagttgacgaaggtg

SEQ ID NO: 1908266 - DNA, 15 bp, Homo sapiens
agttgacgaaggtgg

SEQ ID NO: 1908267 - DNA, 15 bp, Homo sapiens
gttgacgaaggtggt

SEQ ID NO: 1908268 - DNA, 15 bp, Homo sapiens
ttgacgaaggtggta

SEQ ID NO: 1908269 - DNA, 15 bp, Homo sapiens
tgacgaaggtggtag

SEQ ID NO: 1908270 - DNA, 15 bp, Homo sapiens
gacgaaggtggtagg

SEQ ID NO: 1908271 - DNA, 15 bp, Homo sapiens
acgaaggtggtaggt

SEQ ID NO: 1908272 - DNA, 15 bp, Homo sapiens
cgaaggtggtaggtt

SEQ ID NO: 1908273 - DNA, 15 bp, Homo sapiens
gaaggtggtaggttt

SEQ ID NO: 1908274 - DNA, 15 bp, Homo sapiens
aaggtggtaggttta

SEQ ID NO: 1908275 - DNA, 15 bp, Homo sapiens
aggtggtaggtttaa

SEQ ID NO: 1908276 - DNA, 15 bp, Homo sapiens
ggtggtaggtttaat

SEQ ID NO: 1908277 - DNA, 15 bp, Homo sapiens
gtggtaggtttaata

SEQ ID NO: 1908278 - DNA, 15 bp, Homo sapiens
tggtaggtttaataa

SEQ ID NO: 1908279 - DNA, 15 bp, Homo sapiens
ggtaggtttaataag

SEQ ID NO: 1908280 - DNA, 15 bp, Homo sapiens
gtaggtttaataagt

SEQ ID NO: 1908281 - DNA, 15 bp, Homo sapiens
taggtttaataagta

SEQ ID NO: 1908282 - DNA, 15 bp, Homo sapiens
aggtttaataagtac

SEQ ID NO: 1908283 - DNA, 15 bp, Homo sapiens
ggtttaataagtaca

SEQ ID NO: 1908284 - DNA, 15 bp, Homo sapiens
gtttaataagtacat

SEQ ID NO: 1908285 - DNA, 15 bp, Homo sapiens
tttaataagtacata

SEQ ID NO: 1908286 - DNA, 15 bp, Homo sapiens
ttaataagtacatat

SEQ ID NO: 1908287 - DNA, 15 bp, Homo sapiens
taataagtacatatg

SEQ ID NO: 1908288 - DNA, 15 bp, Homo sapiens
aataagtacatatgc

SEQ ID NO: 1908289 - DNA, 15 bp, Homo sapiens
ataagtacatatgca

SEQ ID NO: 1908290 - DNA, 15 bp, Homo sapiens
taagtacatatgcaa

SEQ ID NO: 1908291 - DNA, 15 bp, Homo sapiens
aagtacatatgcaat

SEQ ID NO: 1908292 - DNA, 15 bp, Homo sapiens
agtacatatgcaata

SEQ ID NO: 1908293 - DNA, 15 bp, Homo sapiens
gtacatatgcaatat

SEQ ID NO: 1908294 - DNA, 15 bp, Homo sapiens
tacatatgcaatatg

SEQ ID NO: 1908295 - DNA, 15 bp, Homo sapiens
acatatgcaatatga

SEQ ID NO: 1908296 - DNA, 15 bp, Homo sapiens
catatgcaatatgaa

SEQ ID NO: 1908297 - DNA, 15 bp, Homo sapiens
atatgcaatatgaaa

SEQ ID NO: 1908298 - DNA, 15 bp, Homo sapiens
tatgcaatatgaaac

SEQ ID NO: 1908299 - DNA, 15 bp, Homo sapiens
atgcaatatgaaaca

SEQ ID NO: 1908300 - DNA, 15 bp, Homo sapiens
tgcaatatgaaacat

SEQ ID NO: 1908301 - DNA, 15 bp, Homo sapiens
gcaatatgaaacata

SEQ ID NO: 1908302 - DNA, 15 bp, Homo sapiens
caatatgaaacatag

SEQ ID NO: 1908303 - DNA, 15 bp, Homo sapiens
aatatgaaacatagg

SEQ ID NO: 1908304 - DNA, 15 bp, Homo sapiens
atatgaaacataggt

SEQ ID NO: 1908305 - DNA, 15 bp, Homo sapiens
tatgaaacataggtt

SEQ ID NO: 1908306 - DNA, 15 bp, Homo sapiens
atgaaacataggttc

SEQ ID NO: 1908307 - DNA, 15 bp, Homo sapiens
tgaaacataggttcc

SEQ ID NO: 1908308 - DNA, 15 bp, Homo sapiens
gaaacataggttccc

SEQ ID NO: 1908309 - DNA, 15 bp, Homo sapiens
aaacataggttcccc

SEQ ID NO: 1908310 - DNA, 15 bp, Homo sapiens
aacataggttcccct

SEQ ID NO: 1908311 - DNA, 15 bp, Homo sapiens
acataggttcccctt

SEQ ID NO: 1908312 - DNA, 15 bp, Homo sapiens
cataggttccccttc

SEQ ID NO: 1908313 - DNA, 15 bp, Homo sapiens
ataggttccccttcc

SEQ ID NO: 1908314 - DNA, 15 bp, Homo sapiens
taggttccccttcct

SEQ ID NO: 1908315 - DNA, 15 bp, Homo sapiens
aggttccccttccta

SEQ ID NO: 1908316 - DNA, 15 bp, Homo sapiens
ggttccccttcctat

SEQ ID NO: 1908317 - DNA, 15 bp, Homo sapiens
gttccccttcctatg

SEQ ID NO: 1908318 - DNA, 15 bp, Homo sapiens
ttccccttcctatgg

SEQ ID NO: 1908319 - DNA, 15 bp, Homo sapiens
tccccttcctatggg

SEQ ID NO: 1908320 - DNA, 15 bp, Homo sapiens
ccccttcctatgggg

SEQ ID NO: 1908321 - DNA, 15 bp, Homo sapiens
cccttcctatgggga

SEQ ID NO: 1908322 - DNA, 15 bp, Homo sapiens
ccttcctatggggag

SEQ ID NO: 1908323 - DNA, 15 bp, Homo sapiens
cttcctatggggagg

SEQ ID NO: 1908324 - DNA, 15 bp, Homo sapiens
ttcctatggggaggc

SEQ ID NO: 1908325 - DNA, 15 bp, Homo sapiens
tcctatggggaggca

SEQ ID NO: 1908326 - DNA, 15 bp, Homo sapiens
cctatggggaggcaa

SEQ ID NO: 1908327 - DNA, 15 bp, Homo sapiens
ctatggggaggcaac

SEQ ID NO: 1908328 - DNA, 15 bp, Homo sapiens
tatggggaggcaacc

SEQ ID NO: 1908329 - DNA, 15 bp, Homo sapiens
atggggaggcaacca

SEQ ID NO: 1908330 - DNA, 15 bp, Homo sapiens
tggggaggcaaccaa

SEQ ID NO: 1908331 - DNA, 15 bp, Homo sapiens
ggggaggcaaccaac

SEQ ID NO: 1908332 - DNA, 15 bp, Homo sapiens
gggaggcaaccaact

SEQ ID NO: 1908333 - DNA, 15 bp, Homo sapiens
ggaggcaaccaactg

SEQ ID NO: 1908334 - DNA, 15 bp, Homo sapiens
gaggcaaccaactgt

SEQ ID NO: 1908335 - DNA, 15 bp, Homo sapiens
aggcaaccaactgtg

SEQ ID NO: 1908336 - DNA, 15 bp, Homo sapiens
ggcaaccaactgtgc

SEQ ID NO: 1908337 - DNA, 15 bp, Homo sapiens
gcaaccaactgtgcc

SEQ ID NO: 1908338 - DNA, 15 bp, Homo sapiens
caaccaactgtgcct

SEQ ID NO: 1908339 - DNA, 15 bp, Homo sapiens
aaccaactgtgcctg

SEQ ID NO: 1908340 - DNA, 15 bp, Homo sapiens
accaactgtgcctgc

SEQ ID NO: 1908341 - DNA, 15 bp, Homo sapiens
ccaactgtgcctgct

SEQ ID NO: 1908342 - DNA, 15 bp, Homo sapiens
caactgtgcctgcta

SEQ ID NO: 1908343 - DNA, 15 bp, Homo sapiens
aactgtgcctgctac

SEQ ID NO: 1908344 - DNA, 15 bp, Homo sapiens
actgtgcctgctacg

SEQ ID NO: 1908345 - DNA, 15 bp, Homo sapiens
ctgtgcctgctacgc

SEQ ID NO: 1908346 - DNA, 15 bp, Homo sapiens
tgtgcctgctacgca

SEQ ID NO: 1908347 - DNA, 15 bp, Homo sapiens
gtgcctgctacgcag

SEQ ID NO: 1908348 - DNA, 15 bp, Homo sapiens
tgcctgctacgcaga

SEQ ID NO: 1908349 - DNA, 15 bp, Homo sapiens
gcctgctacgcagag

SEQ ID NO: 1908350 - DNA, 15 bp, Homo sapiens
cctgctacgcagagg

SEQ ID NO: 1908351 - DNA, 15 bp, Homo sapiens
ctgctacgcagaggt

SEQ ID NO: 1908352 - DNA, 15 bp, Homo sapiens
tgctacgcagaggtg

SEQ ID NO: 1908353 - DNA, 15 bp, Homo sapiens
gctacgcagaggtgt

SEQ ID NO: 1908354 - DNA, 15 bp, Homo sapiens
ctacgcagaggtgtt

SEQ ID NO: 1908355 - DNA, 15 bp, Homo sapiens
tacgcagaggtgtta

SEQ ID NO: 1908356 - DNA, 15 bp, Homo sapiens
acgcagaggtgttat

SEQ ID NO: 1908357 - DNA, 15 bp, Homo sapiens
cgcagaggtgttatg

SEQ ID NO: 1908358 - DNA, 15 bp, Homo sapiens
gcagaggtgttatgt

SEQ ID NO: 1908359 - DNA, 15 bp, Homo sapiens
cagaggtgttatgtt

SEQ ID NO: 1908360 - DNA, 15 bp, Homo sapiens
agaggtgttatgttg

SEQ ID NO: 1908361 - DNA, 15 bp, Homo sapiens
gaggtgttatgttgc

SEQ ID NO: 1908362 - DNA, 15 bp, Homo sapiens
aggtgttatgttgcg

SEQ ID NO: 1908363 - DNA, 15 bp, Homo sapiens
ggtgttatgttgcgc

SEQ ID NO: 1908364 - DNA, 15 bp, Homo sapiens
gtgttatgttgcgct

SEQ ID NO: 1908365 - DNA, 15 bp, Homo sapiens
tgttatgttgcgctg

SEQ ID NO: 1908366 - DNA, 15 bp, Homo sapiens
gttatgttgcgctga

SEQ ID NO: 1908367 - DNA, 15 bp, Homo sapiens
ttatgttgcgctgat

SEQ ID NO: 1908368 - DNA, 15 bp, Homo sapiens
tatgttgcgctgatc

SEQ ID NO: 1908369 - DNA, 15 bp, Homo sapiens
atgttgcgctgatca

SEQ ID NO: 1908370 - DNA, 15 bp, Homo sapiens
tgttgcgctgatcaa

SEQ ID NO: 1908371 - DNA, 15 bp, Homo sapiens
gttgcgctgatcaac

SEQ ID NO: 1908372 - DNA, 15 bp, Homo sapiens
ttgcgctgatcaact

SEQ ID NO: 1908373 - DNA, 15 bp, Homo sapiens
tgcgctgatcaactg

SEQ ID NO: 1908374 - DNA, 15 bp, Homo sapiens
gcgctgatcaactgt

SEQ ID NO: 1908375 - DNA, 15 bp, Homo sapiens
cgctgatcaactgta

SEQ ID NO: 1908376 - DNA, 15 bp, Homo sapiens
gctgatcaactgtaa

SEQ ID NO: 1908377 - DNA, 15 bp, Homo sapiens
ctgatcaactgtaac

SEQ ID NO: 1908378 - DNA, 15 bp, Homo sapiens
tgatcaactgtaact

SEQ ID NO: 1908379 - DNA, 15 bp, Homo sapiens
gatcaactgtaactg

SEQ ID NO: 1908380 - DNA, 15 bp, Homo sapiens
atcaactgtaactga

SEQ ID NO: 1908381 - DNA, 15 bp, Homo sapiens
tcaactgtaactgaa

SEQ ID NO: 1908382 - DNA, 15 bp, Homo sapiens
caactgtaactgaat

SEQ ID NO: 1908383 - DNA, 15 bp, Homo sapiens
aactgtaactgaata

SEQ ID NO: 1908384 - DNA, 15 bp, Homo sapiens
actgtaactgaatag

SEQ ID NO: 1908385 - DNA, 15 bp, Homo sapiens
ctgtaactgaatagt

SEQ ID NO: 1908386 - DNA, 15 bp, Homo sapiens
tgtaactgaatagtt

SEQ ID NO: 1908387 - DNA, 15 bp, Homo sapiens
gtaactgaatagttt

SEQ ID NO: 1908388 - DNA, 15 bp, Homo sapiens
taactgaatagttta

SEQ ID NO: 1908389 - DNA, 15 bp, Homo sapiens
aactgaatagtttaa

SEQ ID NO: 1908390 - DNA, 15 bp, Homo sapiens
actgaatagtttaaa

SEQ ID NO: 1908391 - DNA, 15 bp, Homo sapiens
ctgaatagtttaaag

SEQ ID NO: 1908392 - DNA, 15 bp, Homo sapiens
tgaatagtttaaaga

SEQ ID NO: 1908393 - DNA, 15 bp, Homo sapiens
gaatagtttaaagaa

SEQ ID NO: 1908394 - DNA, 15 bp, Homo sapiens
aatagtttaaagaaa

SEQ ID NO: 1908395 - DNA, 15 bp, Homo sapiens
atagtttaaagaaat

SEQ ID NO: 1908396 - DNA, 15 bp, Homo sapiens
tagtttaaagaaatg

SEQ ID NO: 1908397 - DNA, 15 bp, Homo sapiens
agtttaaagaaatgc

SEQ ID NO: 1908398 - DNA, 15 bp, Homo sapiens
gtttaaagaaatgcc

SEQ ID NO: 1908399 - DNA, 15 bp, Homo sapiens
tttaaagaaatgccc

SEQ ID NO: 1908400 - DNA, 15 bp, Homo sapiens
ttaaagaaatgccca

SEQ ID NO: 1908401 - DNA, 15 bp, Homo sapiens
taaagaaatgcccag

SEQ ID NO: 1908402 - DNA, 15 bp, Homo sapiens
aaagaaatgcccagg

SEQ ID NO: 1908403 - DNA, 15 bp, Homo sapiens
aagaaatgcccagga

SEQ ID NO: 1908404 - DNA, 15 bp, Homo sapiens
agaaatgcccaggag

SEQ ID NO: 1908405 - DNA, 15 bp, Homo sapiens
gaaatgcccaggagc

SEQ ID NO: 1908406 - DNA, 15 bp, Homo sapiens
aaatgcccaggagca

SEQ ID NO: 1908407 - DNA, 15 bp, Homo sapiens
aatgcccaggagcac

SEQ ID NO: 1908408 - DNA, 15 bp, Homo sapiens
atgcccaggagcaca

SEQ ID NO: 1908409 - DNA, 15 bp, Homo sapiens
tgcccaggagcacag

SEQ ID NO: 1908410 - DNA, 15 bp, Homo sapiens
gcccaggagcacaga

SEQ ID NO: 1908411 - DNA, 15 bp, Homo sapiens
cccaggagcacagag

SEQ ID NO: 1908412 - DNA, 15 bp, Homo sapiens
ccaggagcacagagg

SEQ ID NO: 1908413 - DNA, 15 bp, Homo sapiens
caggagcacagaggt

SEQ ID NO: 1908414 - DNA, 15 bp, Homo sapiens
aggagcacagaggtt

SEQ ID NO: 1908415 - DNA, 15 bp, Homo sapiens
ggagcacagaggttt

SEQ ID NO: 1908416 - DNA, 15 bp, Homo sapiens
gagcacagaggtttt

SEQ ID NO: 1908417 - DNA, 15 bp, Homo sapiens
agcacagaggttttt

SEQ ID NO: 1908418 - DNA, 15 bp, Homo sapiens
gcacagaggtttttt

SEQ ID NO: 1908419 - DNA, 15 bp, Homo sapiens
cacagaggttttttc

SEQ ID NO: 1908420 - DNA, 15 bp, Homo sapiens
acagaggttttttca

SEQ ID NO: 1908421 - DNA, 15 bp, Homo sapiens
cagaggttttttcat

SEQ ID NO: 1908422 - DNA, 15 bp, Homo sapiens
agaggttttttcatg

SEQ ID NO: 1908423 - DNA, 15 bp, Homo sapiens
gaggttttttcatga

SEQ ID NO: 1908424 - DNA, 15 bp, Homo sapiens
aggttttttcatgac

SEQ ID NO: 1908425 - DNA, 15 bp, Homo sapiens
ggttttttcatgaca

SEQ ID NO: 1908426 - DNA, 15 bp, Homo sapiens
gttttttcatgacag

SEQ ID NO: 1908427 - DNA, 15 bp, Homo sapiens
ttttttcatgacagt

SEQ ID NO: 1908428 - DNA, 15 bp, Homo sapiens
tttttcatgacagta

SEQ ID NO: 1908429 - DNA, 15 bp, Homo sapiens
ttttcatgacagtaa

SEQ ID NO: 1908430 - DNA, 15 bp, Homo sapiens
tttcatgacagtaaa

SEQ ID NO: 1908431 - DNA, 15 bp, Homo sapiens
ttcatgacagtaaat

SEQ ID NO: 1908432 - DNA, 15 bp, Homo sapiens
tcatgacagtaaata

SEQ ID NO: 1908433 - DNA, 15 bp, Homo sapiens
catgacagtaaataa

SEQ ID NO: 1908434 - DNA, 15 bp, Homo sapiens
atgacagtaaataac

SEQ ID NO: 1908435 - DNA, 15 bp, Homo sapiens
tgacagtaaataaca

SEQ ID NO: 1908436 - DNA, 15 bp, Homo sapiens
gacagtaaataacag

SEQ ID NO: 1908437 - DNA, 15 bp, Homo sapiens
acagtaaataacagg

SEQ ID NO: 1908438 - DNA, 15 bp, Homo sapiens
cagtaaataacaggt

SEQ ID NO: 1908439 - DNA, 15 bp, Homo sapiens
agtaaataacaggtg

SEQ ID NO: 1908440 - DNA, 15 bp, Homo sapiens
gtaaataacaggtgg

SEQ ID NO: 1908441 - DNA, 15 bp, Homo sapiens
taaataacaggtggt

SEQ ID NO: 1908442 - DNA, 15 bp, Homo sapiens
aaataacaggtggtc

SEQ ID NO: 1908443 - DNA, 15 bp, Homo sapiens
aataacaggtggtca

SEQ ID NO: 1908444 - DNA, 15 bp, Homo sapiens
ataacaggtggtcaa

SEQ ID NO: 1908445 - DNA, 15 bp, Homo sapiens
taacaggtggtcaaa

SEQ ID NO: 1908446 - DNA, 15 bp, Homo sapiens
aacaggtggtcaaag

SEQ ID NO: 1908447 - DNA, 15 bp, Homo sapiens
acaggtggtcaaagt

SEQ ID NO: 1908448 - DNA, 15 bp, Homo sapiens
caggtggtcaaagta

SEQ ID NO: 1908449 - DNA, 15 bp, Homo sapiens
aggtggtcaaagtag

SEQ ID NO: 1908450 - DNA, 15 bp, Homo sapiens
ggtggtcaaagtagg

SEQ ID NO: 1908451 - DNA, 15 bp, Homo sapiens
gtggtcaaagtaggc

SEQ ID NO: 1908452 - DNA, 15 bp, Homo sapiens
tggtcaaagtaggct

SEQ ID NO: 1908453 - DNA, 15 bp, Homo sapiens
ggtcaaagtaggctt

SEQ ID NO: 1908454 - DNA, 15 bp, Homo sapiens
gtcaaagtaggcttt

SEQ ID NO: 1908455 - DNA, 15 bp, Homo sapiens
tcaaagtaggctttt

SEQ ID NO: 1908456 - DNA, 15 bp, Homo sapiens
caaagtaggcttttt

SEQ ID NO: 1908457 - DNA, 15 bp, Homo sapiens
aaagtaggctttttg

SEQ ID NO: 1908458 - DNA, 15 bp, Homo sapiens
aagtaggctttttga

SEQ ID NO: 1908459 - DNA, 15 bp, Homo sapiens
agtaggctttttgaa

SEQ ID NO: 1908460 - DNA, 15 bp, Homo sapiens
gtaggctttttgaag

SEQ ID NO: 1908461 - DNA, 15 bp, Homo sapiens
taggctttttgaaga

SEQ ID NO: 1908462 - DNA, 15 bp, Homo sapiens
aggctttttgaagaa

SEQ ID NO: 1908463 - DNA, 15 bp, Homo sapiens
ggctttttgaagaaa

SEQ ID NO: 1908464 - DNA, 15 bp, Homo sapiens
gctttttgaagaaac

SEQ ID NO: 1908465 - DNA, 15 bp, Homo sapiens
ctttttgaagaaaca

SEQ ID NO: 1908466 - DNA, 15 bp, Homo sapiens
tttttgaagaaacac

SEQ ID NO: 1908467 - DNA, 15 bp, Homo sapiens
ttttgaagaaacaca

SEQ ID NO: 1908468 - DNA, 15 bp, Homo sapiens
tttgaagaaacacag

SEQ ID NO: 1908469 - DNA, 15 bp, Homo sapiens
ttgaagaaacacaga

SEQ ID NO: 1908470 - DNA, 15 bp, Homo sapiens
tgaagaaacacagag

SEQ ID NO: 1908471 - DNA, 15 bp, Homo sapiens
gaagaaacacagagc

SEQ ID NO: 1908472 - DNA, 15 bp, Homo sapiens
aagaaacacagagcc

SEQ ID NO: 1908473 - DNA, 15 bp, Homo sapiens
agaaacacagagcct

SEQ ID NO: 1908474 - DNA, 15 bp, Homo sapiens
gaaacacagagccta

SEQ ID NO: 1908475 - DNA, 15 bp, Homo sapiens
aaacacagagcctat

SEQ ID NO: 1908476 - DNA, 15 bp, Homo sapiens
aacacagagcctatt

SEQ ID NO: 1908477 - DNA, 15 bp, Homo sapiens
acacagagcctattt

SEQ ID NO: 1908478 - DNA, 15 bp, Homo sapiens
cacagagcctatttt

SEQ ID NO: 1908479 - DNA, 15 bp, Homo sapiens
acagagcctatttta

SEQ ID NO: 1908480 - DNA, 15 bp, Homo sapiens
cagagcctattttat

SEQ ID NO: 1908481 - DNA, 15 bp, Homo sapiens
agagcctattttatt

SEQ ID NO: 1908482 - DNA, 15 bp, Homo sapiens
gagcctattttatta

SEQ ID NO: 1908483 - DNA, 15 bp, Homo sapiens
agcctattttattaa

SEQ ID NO: 1908484 - DNA, 15 bp, Homo sapiens
gcctattttattaac

SEQ ID NO: 1908485 - DNA, 15 bp, Homo sapiens
cctattttattaaca

SEQ ID NO: 1908486 - DNA, 15 bp, Homo sapiens
ctattttattaacaa

SEQ ID NO: 1908487 - DNA, 15 bp, Homo sapiens
tattttattaacaac

SEQ ID NO: 1908488 - DNA, 15 bp, Homo sapiens
attttattaacaaca

SEQ ID NO: 1908489 - DNA, 15 bp, Homo sapiens
ttttattaacaacag

SEQ ID NO: 1908490 - DNA, 15 bp, Homo sapiens
tttattaacaacagt

SEQ ID NO: 1908491 - DNA, 15 bp, Homo sapiens
ttattaacaacagtc

SEQ ID NO: 1908492 - DNA, 15 bp, Homo sapiens
tattaacaacagtct

SEQ ID NO: 1908493 - DNA, 15 bp, Homo sapiens
attaacaacagtctg

SEQ ID NO: 1908494 - DNA, 15 bp, Homo sapiens
ttaacaacagtctgt

SEQ ID NO: 1908495 - DNA, 15 bp, Homo sapiens
taacaacagtctgtg

SEQ ID NO: 1908496 - DNA, 15 bp, Homo sapiens
aacaacagtctgtgt

SEQ ID NO: 1908497 - DNA, 15 bp, Homo sapiens
acaacagtctgtgtt

SEQ ID NO: 1908498 - DNA, 15 bp, Homo sapiens
caacagtctgtgttc

SEQ ID NO: 1908499 - DNA, 15 bp, Homo sapiens
aacagtctgtgttct

SEQ ID NO: 1908500 - DNA, 15 bp, Homo sapiens
acagtctgtgttctt

SEQ ID NO: 1908501 - DNA, 15 bp, Homo sapiens
cagtctgtgttctta

SEQ ID NO: 1908502 - DNA, 15 bp, Homo sapiens
agtctgtgttcttac

SEQ ID NO: 1908503 - DNA, 15 bp, Homo sapiens
gtctgtgttcttaca

SEQ ID NO: 1908504 - DNA, 15 bp, Homo sapiens
tctgtgttcttacag

SEQ ID NO: 1908505 - DNA, 15 bp, Homo sapiens
ctgtgttcttacaga

SEQ ID NO: 1908506 - DNA, 15 bp, Homo sapiens
tgtgttcttacagag

SEQ ID NO: 1908507 - DNA, 15 bp, Homo sapiens
gtgttcttacagaga

SEQ ID NO: 1908508 - DNA, 15 bp, Homo sapiens
tgttcttacagagac

SEQ ID NO: 1908509 - DNA, 15 bp, Homo sapiens
gttcttacagagact

SEQ ID NO: 1908510 - DNA, 15 bp, Homo sapiens
ttcttacagagactc

SEQ ID NO: 1908511 - DNA, 15 bp, Homo sapiens
tcttacagagactct

SEQ ID NO: 1908512 - DNA, 15 bp, Homo sapiens
cttacagagactctg

SEQ ID NO: 1908513 - DNA, 15 bp, Homo sapiens
ttacagagactctgg

SEQ ID NO: 1908514 - DNA, 15 bp, Homo sapiens
tacagagactctggg

SEQ ID NO: 1908515 - DNA, 15 bp, Homo sapiens
acagagactctgggg

SEQ ID NO: 1908516 - DNA, 15 bp, Homo sapiens
cagagactctgggga

SEQ ID NO: 1908517 - DNA, 15 bp, Homo sapiens
agagactctggggac

SEQ ID NO: 1908518 - DNA, 15 bp, Homo sapiens
gagactctggggacg

SEQ ID NO: 1908519 - DNA, 15 bp, Homo sapiens
agactctggggacgt

SEQ ID NO: 1908520 - DNA, 15 bp, Homo sapiens
gactctggggacgtt

SEQ ID NO: 1908521 - DNA, 15 bp, Homo sapiens
actctggggacgttg

SEQ ID NO: 1908522 - DNA, 15 bp, Homo sapiens
ctctggggacgttgc

SEQ ID NO: 1908523 - DNA, 15 bp, Homo sapiens
tctggggacgttgca

SEQ ID NO: 1908524 - DNA, 15 bp, Homo sapiens
ctggggacgttgcag

SEQ ID NO: 1908525 - DNA, 15 bp, Homo sapiens
tggggacgttgcagc

SEQ ID NO: 1908526 - DNA, 15 bp, Homo sapiens
ggggacgttgcagct

SEQ ID NO: 1908527 - DNA, 15 bp, Homo sapiens
gggacgttgcagctc

SEQ ID NO: 1908528 - DNA, 15 bp, Homo sapiens
ggacgttgcagctct

SEQ ID NO: 1908529 - DNA, 15 bp, Homo sapiens
gacgttgcagctctc

SEQ ID NO: 1908530 - DNA, 15 bp, Homo sapiens
acgttgcagctctca

SEQ ID NO: 1908531 - DNA, 15 bp, Homo sapiens
cgttgcagctctcag

SEQ ID NO: 1908532 - DNA, 15 bp, Homo sapiens
gttgcagctctcaga

SEQ ID NO: 1908533 - DNA, 15 bp, Homo sapiens
ttgcagctctcagag

SEQ ID NO: 1908534 - DNA, 15 bp, Homo sapiens
tgcagctctcagagg

SEQ ID NO: 1908535 - DNA, 15 bp, Homo sapiens
gcagctctcagaggg

SEQ ID NO: 1908536 - DNA, 15 bp, Homo sapiens
cagctctcagagggt

SEQ ID NO: 1908537 - DNA, 15 bp, Homo sapiens
agctctcagagggta

SEQ ID NO: 1908538 - DNA, 15 bp, Homo sapiens
gctctcagagggtaa

SEQ ID NO: 1908539 - DNA, 15 bp, Homo sapiens
ctctcagagggtaag

SEQ ID NO: 1908540 - DNA, 15 bp, Homo sapiens
tctcagagggtaagt

SEQ ID NO: 1908541 - DNA, 15 bp, Homo sapiens
ctcagagggtaagtt

SEQ ID NO: 1908542 - DNA, 15 bp, Homo sapiens
tcagagggtaagttc

SEQ ID NO: 1908543 - DNA, 15 bp, Homo sapiens
cagagggtaagttca

SEQ ID NO: 1908544 - DNA, 15 bp, Homo sapiens
agagggtaagttcag

SEQ ID NO: 1908545 - DNA, 15 bp, Homo sapiens
gagggtaagttcagc

SEQ ID NO: 1908546 - DNA, 15 bp, Homo sapiens
agggtaagttcagcc

SEQ ID NO: 1908547 - DNA, 15 bp, Homo sapiens
gggtaagttcagcct

SEQ ID NO: 1908548 - DNA, 15 bp, Homo sapiens
ggtaagttcagccta

SEQ ID NO: 1908549 - DNA, 15 bp, Homo sapiens
gtaagttcagcctag

SEQ ID NO: 1908550 - DNA, 15 bp, Homo sapiens
taagttcagcctaga

SEQ ID NO: 1908551 - DNA, 15 bp, Homo sapiens
aagttcagcctagag

SEQ ID NO: 1908552 - DNA, 15 bp, Homo sapiens
agttcagcctagagg

SEQ ID NO: 1908553 - DNA, 15 bp, Homo sapiens
gttcagcctagaggc

SEQ ID NO: 1908554 - DNA, 15 bp, Homo sapiens
ttcagcctagaggct

SEQ ID NO: 1908555 - DNA, 15 bp, Homo sapiens
tcagcctagaggctt

SEQ ID NO: 1908556 - DNA, 15 bp, Homo sapiens
cagcctagaggcttc

SEQ ID NO: 1908557 - DNA, 15 bp, Homo sapiens
gcctagaggcttcct

SEQ ID NO: 1908558 - DNA, 15 bp, Homo sapiens
cctagaggcttcctt

SEQ ID NO: 1908559 - DNA, 15 bp, Homo sapiens
ctagaggcttccttt

SEQ ID NO: 1908560 - DNA, 15 bp, Homo sapiens
tagaggcttcctttt

SEQ ID NO: 1908561 - DNA, 15 bp, Homo sapiens
agaggcttccttttg

SEQ ID NO: 1908562 - DNA, 15 bp, Homo sapiens
gaggcttccttttgt

SEQ ID NO: 1908563 - DNA, 15 bp, Homo sapiens
aggcttccttttgtt

SEQ ID NO: 1908564 - DNA, 15 bp, Homo sapiens
ggcttccttttgttc

SEQ ID NO: 1908565 - DNA, 15 bp, Homo sapiens
gcttccttttgttcc

SEQ ID NO: 1908566 - DNA, 15 bp, Homo sapiens
cttccttttgttccg

SEQ ID NO: 1908567 - DNA, 15 bp, Homo sapiens
ttccttttgttccgt

SEQ ID NO: 1908568 - DNA, 15 bp, Homo sapiens
tccttttgttccgtt

SEQ ID NO: 1908569 - DNA, 15 bp, Homo sapiens
ccttttgttccgttt

SEQ ID NO: 1908570 - DNA, 15 bp, Homo sapiens
cttttgttccgttta

SEQ ID NO: 1908571 - DNA, 15 bp, Homo sapiens
ttttgttccgtttaa

SEQ ID NO: 1908572 - DNA, 15 bp, Homo sapiens
tttgttccgtttaac

SEQ ID NO: 1908573 - DNA, 15 bp, Homo sapiens
ttgttccgtttaacc

SEQ ID NO: 1908574 - DNA, 15 bp, Homo sapiens
tgttccgtttaacct

SEQ ID NO: 1908575 - DNA, 15 bp, Homo sapiens
gttccgtttaaccta

SEQ ID NO: 1908576 - DNA, 15 bp, Homo sapiens
ttccgtttaacctaa

SEQ ID NO: 1908577 - DNA, 15 bp, Homo sapiens
tccgtttaacctaac

SEQ ID NO: 1908578 - DNA, 15 bp, Homo sapiens
ccgtttaacctaact

SEQ ID NO: 1908579 - DNA, 15 bp, Homo sapiens
cgtttaacctaactt

SEQ ID NO: 1908580 - DNA, 15 bp, Homo sapiens
gtttaacctaacttc

SEQ ID NO: 1908581 - DNA, 15 bp, Homo sapiens
tttaacctaacttca

SEQ ID NO: 1908582 - DNA, 15 bp, Homo sapiens
ttaacctaacttcat

SEQ ID NO: 1908583 - DNA, 15 bp, Homo sapiens
taacctaacttcatc

SEQ ID NO: 1908584 - DNA, 15 bp, Homo sapiens
aacctaacttcatcc

SEQ ID NO: 1908585 - DNA, 15 bp, Homo sapiens
acctaacttcatcct

SEQ ID NO: 1908586 - DNA, 15 bp, Homo sapiens
cctaacttcatcctc

SEQ ID NO: 1908587 - DNA, 15 bp, Homo sapiens
ctaacttcatcctcc

SEQ ID NO: 1908588 - DNA, 15 bp, Homo sapiens
taacttcatcctccg

SEQ ID NO: 1908589 - DNA, 15 bp, Homo sapiens
aacttcatcctccgg

SEQ ID NO: 1908590 - DNA, 15 bp, Homo sapiens
acttcatcctccggc

SEQ ID NO: 1908591 - DNA, 15 bp, Homo sapiens
cttcatcctccggct

SEQ ID NO: 1908592 - DNA, 15 bp, Homo sapiens
ttcatcctccggcta

SEQ ID NO: 1908593 - DNA, 15 bp, Homo sapiens
tcatcctccggctac

SEQ ID NO: 1908594 - DNA, 15 bp, Homo sapiens
catcctccggctact

SEQ ID NO: 1908595 - DNA, 15 bp, Homo sapiens
atcctccggctactt

SEQ ID NO: 1908596 - DNA, 15 bp, Homo sapiens
tcctccggctacttg

SEQ ID NO: 1908597 - DNA, 15 bp, Homo sapiens
cctccggctacttgg

SEQ ID NO: 1908598 - DNA, 15 bp, Homo sapiens
ctccggctacttggt

SEQ ID NO: 1908599 - DNA, 15 bp, Homo sapiens
tccggctacttggtc

SEQ ID NO: 1908600 - DNA, 15 bp, Homo sapiens
ccggctacttggtca

SEQ ID NO: 1908601 - DNA, 15 bp, Homo sapiens
cggctacttggtcac

SEQ ID NO: 1908602 - DNA, 15 bp, Homo sapiens
ggctacttggtcacc

SEQ ID NO: 1908603 - DNA, 15 bp, Homo sapiens
gctacttggtcacct

SEQ ID NO: 1908604 - DNA, 15 bp, Homo sapiens
ctacttggtcaccta

SEQ ID NO: 1908605 - DNA, 15 bp, Homo sapiens
tacttggtcacctac

SEQ ID NO: 1908606 - DNA, 15 bp, Homo sapiens
acttggtcacctaca

SEQ ID NO: 1908607 - DNA, 15 bp, Homo sapiens
cttggtcacctacat

SEQ ID NO: 1908608 - DNA, 15 bp, Homo sapiens
ttggtcacctacata

SEQ ID NO: 1908609 - DNA, 15 bp, Homo sapiens
tggtcacctacatag

SEQ ID NO: 1908610 - DNA, 15 bp, Homo sapiens
ggtcacctacatagt

SEQ ID NO: 1908611 - DNA, 15 bp, Homo sapiens
gtcacctacatagtt

SEQ ID NO: 1908612 - DNA, 15 bp, Homo sapiens
tcacctacatagttg

SEQ ID NO: 1908613 - DNA, 15 bp, Homo sapiens
cacctacatagttga

SEQ ID NO: 1908614 - DNA, 15 bp, Homo sapiens
acctacatagttgat

SEQ ID NO: 1908615 - DNA, 15 bp, Homo sapiens
cctacatagttgatt

SEQ ID NO: 1908616 - DNA, 15 bp, Homo sapiens
ctacatagttgattg

SEQ ID NO: 1908617 - DNA, 15 bp, Homo sapiens
tacatagttgattgt

SEQ ID NO: 1908618 - DNA, 15 bp, Homo sapiens
acatagttgattgtt

SEQ ID NO: 1908619 - DNA, 15 bp, Homo sapiens
catagttgattgttc

SEQ ID NO: 1908620 - DNA, 15 bp, Homo sapiens
atagttgattgttcc

SEQ ID NO: 1908621 - DNA, 15 bp, Homo sapiens
tagttgattgttccc

SEQ ID NO: 1908622 - DNA, 15 bp, Homo sapiens
agttgattgttcccc

SEQ ID NO: 1908623 - DNA, 15 bp, Homo sapiens
gttgattgttcccct

SEQ ID NO: 1908624 - DNA, 15 bp, Homo sapiens
ttgattgttcccctg

SEQ ID NO: 1908625 - DNA, 15 bp, Homo sapiens
tgattgttcccctgt

SEQ ID NO: 1908626 - DNA, 15 bp, Homo sapiens
gattgttcccctgtg

SEQ ID NO: 1908627 - DNA, 15 bp, Homo sapiens
attgttcccctgtga

SEQ ID NO: 1908628 - DNA, 15 bp, Homo sapiens
ttgttcccctgtgat

SEQ ID NO: 1908629 - DNA, 15 bp, Homo sapiens
tgttcccctgtgatt

SEQ ID NO: 1908630 - DNA, 15 bp, Homo sapiens
gttcccctgtgattc

SEQ ID NO: 1908631 - DNA, 15 bp, Homo sapiens
ttcccctgtgattca

SEQ ID NO: 1908632 - DNA, 15 bp, Homo sapiens
tcccctgtgattcag

SEQ ID NO: 1908633 - DNA, 15 bp, Homo sapiens
cccctgtgattcaga

SEQ ID NO: 1908634 - DNA, 15 bp, Homo sapiens
ccctgtgattcagat

SEQ ID NO: 1908635 - DNA, 15 bp, Homo sapiens
cctgtgattcagatc

SEQ ID NO: 1908636 - DNA, 15 bp, Homo sapiens
ctgtgattcagatcc

SEQ ID NO: 1908637 - DNA, 15 bp, Homo sapiens
tgtgattcagatccc

SEQ ID NO: 1908638 - DNA, 15 bp, Homo sapiens
gtgattcagatcccg

SEQ ID NO: 1908639 - DNA, 15 bp, Homo sapiens
tgattcagatcccgg

SEQ ID NO: 1908640 - DNA, 15 bp, Homo sapiens
gattcagatcccgga

SEQ ID NO: 1908641 - DNA, 15 bp, Homo sapiens
attcagatcccggaa

SEQ ID NO: 1908642 - DNA, 15 bp, Homo sapiens
ttcagatcccggaaa

SEQ ID NO: 1908643 - DNA, 15 bp, Homo sapiens
tcagatcccggaaat

SEQ ID NO: 1908644 - DNA, 15 bp, Homo sapiens
cagatcccggaaatt

SEQ ID NO: 1908645 - DNA, 15 bp, Homo sapiens
agatcccggaaattt

SEQ ID NO: 1908646 - DNA, 15 bp, Homo sapiens
gatcccggaaattta

SEQ ID NO: 1908647 - DNA, 15 bp, Homo sapiens
atcccggaaatttaa

SEQ ID NO: 1908648 - DNA, 15 bp, Homo sapiens
tcccggaaatttaac

SEQ ID NO: 1908649 - DNA, 15 bp, Homo sapiens
cccggaaatttaaca

SEQ ID NO: 1908650 - DNA, 15 bp, Homo sapiens
ccggaaatttaacat

SEQ ID NO: 1908651 - DNA, 15 bp, Homo sapiens
cggaaatttaacatt

SEQ ID NO: 1908652 - DNA, 15 bp, Homo sapiens
ggaaatttaacattc

SEQ ID NO: 1908653 - DNA, 15 bp, Homo sapiens
gaaatttaacattct

SEQ ID NO: 1908654 - DNA, 15 bp, Homo sapiens
aaatttaacattctg

SEQ ID NO: 1908655 - DNA, 15 bp, Homo sapiens
aatttaacattctgg

SEQ ID NO: 1908656 - DNA, 15 bp, Homo sapiens
atttaacattctggg

SEQ ID NO: 1908657 - DNA, 15 bp, Homo sapiens
tttaacattctgggc

SEQ ID NO: 1908658 - DNA, 15 bp, Homo sapiens
ttaacattctgggca

SEQ ID NO: 1908659 - DNA, 15 bp, Homo sapiens
taacattctgggcac

SEQ ID NO: 1908660 - DNA, 15 bp, Homo sapiens
aacattctgggcaca

SEQ ID NO: 1908661 - DNA, 15 bp, Homo sapiens
acattctgggcacaa

SEQ ID NO: 1908662 - DNA, 15 bp, Homo sapiens
cattctgggcacaaa

SEQ ID NO: 1908663 - DNA, 15 bp, Homo sapiens
attctgggcacaaac

SEQ ID NO: 1908664 - DNA, 15 bp, Homo sapiens
ttctgggcacaaaca

SEQ ID NO: 1908665 - DNA, 15 bp, Homo sapiens
tctgggcacaaacac

SEQ ID NO: 1908666 - DNA, 15 bp, Homo sapiens
ctgggcacaaacaca

SEQ ID NO: 1908667 - DNA, 15 bp, Homo sapiens
tgggcacaaacacaa

SEQ ID NO: 1908668 - DNA, 15 bp, Homo sapiens
gggcacaaacacaaa

SEQ ID NO: 1908669 - DNA, 15 bp, Homo sapiens
ggcacaaacacaaaa

SEQ ID NO: 1908670 - DNA, 15 bp, Homo sapiens
gcacaaacacaaaag

SEQ ID NO: 1908671 - DNA, 15 bp, Homo sapiens
cacaaacacaaaagt

SEQ ID NO: 1908672 - DNA, 15 bp, Homo sapiens
acaaacacaaaagtg

SEQ ID NO: 1908673 - DNA, 15 bp, Homo sapiens
caaacacaaaagtga

SEQ ID NO: 1908674 - DNA, 15 bp, Homo sapiens
aaacacaaaagtgat

SEQ ID NO: 1908675 - DNA, 15 bp, Homo sapiens
aacacaaaagtgatg

SEQ ID NO: 1908676 - DNA, 15 bp, Homo sapiens
acacaaaagtgatga

SEQ ID NO: 1908677 - DNA, 15 bp, Homo sapiens
cacaaaagtgatgaa

SEQ ID NO: 1908678 - DNA, 15 bp, Homo sapiens
acaaaagtgatgaac

SEQ ID NO: 1908679 - DNA, 15 bp, Homo sapiens
caaaagtgatgaaca

SEQ ID NO: 1908680 - DNA, 15 bp, Homo sapiens
aaaagtgatgaacat

SEQ ID NO: 1908681 - DNA, 15 bp, Homo sapiens
aaagtgatgaacatg

SEQ ID NO: 1908682 - DNA, 15 bp, Homo sapiens
aagtgatgaacatgg

SEQ ID NO: 1908683 - DNA, 15 bp, Homo sapiens
agtgatgaacatgga

SEQ ID NO: 1908684 - DNA, 15 bp, Homo sapiens
gtgatgaacatggaa

SEQ ID NO: 1908685 - DNA, 15 bp, Homo sapiens
tgatgaacatggaag

SEQ ID NO: 1908686 - DNA, 15 bp, Homo sapiens
gatgaacatggaaga

SEQ ID NO: 1908687 - DNA, 15 bp, Homo sapiens
atgaacatggaagaa

SEQ ID NO: 1908688 - DNA, 15 bp, Homo sapiens
tgaacatggaagaat

SEQ ID NO: 1908689 - DNA, 15 bp, Homo sapiens
gaacatggaagaatc

SEQ ID NO: 1908690 - DNA, 15 bp, Homo sapiens
aacatggaagaatcc

SEQ ID NO: 1908691 - DNA, 15 bp, Homo sapiens
acatggaagaatcca

SEQ ID NO: 1908692 - DNA, 15 bp, Homo sapiens
catggaagaatccaa

SEQ ID NO: 1908693 - DNA, 15 bp, Homo sapiens
atggaagaatccaac

SEQ ID NO: 1908694 - DNA, 15 bp, Homo sapiens
tggaagaatccaaca

SEQ ID NO: 1908695 - DNA, 15 bp, Homo sapiens
ggaagaatccaacaa

SEQ ID NO: 1908696 - DNA, 15 bp, Homo sapiens
gaagaatccaacaac

SEQ ID NO: 1908697 - DNA, 15 bp, Homo sapiens
aagaatccaacaacg

SEQ ID NO: 1908698 - DNA, 15 bp, Homo sapiens
agaatccaacaacgg

SEQ ID NO: 1908699 - DNA, 15 bp, Homo sapiens
gaatccaacaacggc

SEQ ID NO: 1908700 - DNA, 15 bp, Homo sapiens
aatccaacaacggca

SEQ ID NO: 1908701 - DNA, 15 bp, Homo sapiens
atccaacaacggcag

SEQ ID NO: 1908702 - DNA, 15 bp, Homo sapiens
tccaacaacggcagc

SEQ ID NO: 1908703 - DNA, 15 bp, Homo sapiens
ccaacaacggcagcc

SEQ ID NO: 1908704 - DNA, 15 bp, Homo sapiens
caacaacggcagcct

SEQ ID NO: 1908705 - DNA, 15 bp, Homo sapiens
aacaacggcagcctc

SEQ ID NO: 1908706 - DNA, 15 bp, Homo sapiens
acaacggcagcctct

SEQ ID NO: 1908707 - DNA, 15 bp, Homo sapiens
caacggcagcctctc

SEQ ID NO: 1908708 - DNA, 15 bp, Homo sapiens
aacggcagcctctct

SEQ ID NO: 1908709 - DNA, 15 bp, Homo sapiens
acggcagcctctctg

SEQ ID NO: 1908710 - DNA, 15 bp, Homo sapiens
cggcagcctctctgc

SEQ ID NO: 1908711 - DNA, 15 bp, Homo sapiens
ggcagcctctctgca

SEQ ID NO: 1908712 - DNA, 15 bp, Homo sapiens
gcagcctctctgcag

SEQ ID NO: 1908713 - DNA, 15 bp, Homo sapiens
cagcctctctgcaga

SEQ ID NO: 1908714 - DNA, 15 bp, Homo sapiens
agcctctctgcagaa

SEQ ID NO: 1908715 - DNA, 15 bp, Homo sapiens
gcctctctgcagaat

SEQ ID NO: 1908716 - DNA, 15 bp, Homo sapiens
cctctctgcagaatt

SEQ ID NO: 1908717 - DNA, 15 bp, Homo sapiens
ctctctgcagaattc

SEQ ID NO: 1908718 - DNA, 15 bp, Homo sapiens
tctctgcagaattca

SEQ ID NO: 1908719 - DNA, 15 bp, Homo sapiens
ctctgcagaattcaa

SEQ ID NO: 1908720 - DNA, 15 bp, Homo sapiens
ctgcagaattcaaac

SEQ ID NO: 1908721 - DNA, 15 bp, Homo sapiens
tgcagaattcaaaca

SEQ ID NO: 1908722 - DNA, 15 bp, Homo sapiens
gcagaattcaaacac

SEQ ID NO: 1908723 - DNA, 15 bp, Homo sapiens
cagaattcaaacact

SEQ ID NO: 1908724 - DNA, 15 bp, Homo sapiens
agaattcaaacactt

SEQ ID NO: 1908725 - DNA, 15 bp, Homo sapiens
gaattcaaacacttg

SEQ ID NO: 1908726 - DNA, 15 bp, Homo sapiens
aattcaaacacttgg

SEQ ID NO: 1908727 - DNA, 15 bp, Homo sapiens
attcaaacacttggt

SEQ ID NO: 1908728 - DNA, 15 bp, Homo sapiens
ttcaaacacttggta

SEQ ID NO: 1908729 - DNA, 15 bp, Homo sapiens
tcaaacacttggtat

SEQ ID NO: 1908730 - DNA, 15 bp, Homo sapiens
caaacacttggtatg

SEQ ID NO: 1908731 - DNA, 15 bp, Homo sapiens
aaacacttggtatgt

SEQ ID NO: 1908732 - DNA, 15 bp, Homo sapiens
aacacttggtatgtg

SEQ ID NO: 1908733 - DNA, 15 bp, Homo sapiens
cacttggtatgtggg

SEQ ID NO: 1908734 - DNA, 15 bp, Homo sapiens
acttggtatgtggga

SEQ ID NO: 1908735 - DNA, 15 bp, Homo sapiens
cttggtatgtgggag

SEQ ID NO: 1908736 - DNA, 15 bp, Homo sapiens
ttggtatgtgggagg

SEQ ID NO: 1908737 - DNA, 15 bp, Homo sapiens
tggtatgtgggagga

SEQ ID NO: 1908738 - DNA, 15 bp, Homo sapiens
ggtatgtgggaggag

SEQ ID NO: 1908739 - DNA, 15 bp, Homo sapiens
gtatgtgggaggagc

SEQ ID NO: 1908740 - DNA, 15 bp, Homo sapiens
tatgtgggaggagct

SEQ ID NO: 1908741 - DNA, 15 bp, Homo sapiens
atgtgggaggagctc

SEQ ID NO: 1908742 - DNA, 15 bp, Homo sapiens
tgtgggaggagctcc

SEQ ID NO: 1908743 - DNA, 15 bp, Homo sapiens
gtgggaggagctccc

SEQ ID NO: 1908744 - DNA, 15 bp, Homo sapiens
tgggaggagctcccc

SEQ ID NO: 1908745 - DNA, 15 bp, Homo sapiens
gggaggagctcccct

SEQ ID NO: 1908746 - DNA, 15 bp, Homo sapiens
ggaggagctcccctt

SEQ ID NO: 1908747 - DNA, 15 bp, Homo sapiens
gaggagctccccttc

SEQ ID NO: 1908748 - DNA, 15 bp, Homo sapiens
aggagctccccttca

SEQ ID NO: 1908749 - DNA, 15 bp, Homo sapiens
ggagctccccttcac

SEQ ID NO: 1908750 - DNA, 15 bp, Homo sapiens
gagctccccttcaca

SEQ ID NO: 1908751 - DNA, 15 bp, Homo sapiens
agctccccttcacaa

SEQ ID NO: 1908752 - DNA, 15 bp, Homo sapiens
gctccccttcacaaa

SEQ ID NO: 1908753 - DNA, 15 bp, Homo sapiens
ctccccttcacaaag

SEQ ID NO: 1908754 - DNA, 15 bp, Homo sapiens
tccccttcacaaagg

SEQ ID NO: 1908755 - DNA, 15 bp, Homo sapiens
ccccttcacaaaggg

SEQ ID NO: 1908756 - DNA, 15 bp, Homo sapiens
cccttcacaaagggc

SEQ ID NO: 1908757 - DNA, 15 bp, Homo sapiens
ccttcacaaagggcc

SEQ ID NO: 1908758 - DNA, 15 bp, Homo sapiens
cttcacaaagggcct

SEQ ID NO: 1908759 - DNA, 15 bp, Homo sapiens
ttcacaaagggcctc

SEQ ID NO: 1908760 - DNA, 15 bp, Homo sapiens
tcacaaagggcctct

SEQ ID NO: 1908761 - DNA, 15 bp, Homo sapiens
cacaaagggcctctg

SEQ ID NO: 1908762 - DNA, 15 bp, Homo sapiens
acaaagggcctctgg

SEQ ID NO: 1908763 - DNA, 15 bp, Homo sapiens
caaagggcctctggc

SEQ ID NO: 1908764 - DNA, 15 bp, Homo sapiens
aaagggcctctggct

SEQ ID NO: 1908765 - DNA, 15 bp, Homo sapiens
aagggcctctggctg

SEQ ID NO: 1908766 - DNA, 15 bp, Homo sapiens
agggcctctggctgc

SEQ ID NO: 1908767 - DNA, 15 bp, Homo sapiens
gggcctctggctgcc

SEQ ID NO: 1908768 - DNA, 15 bp, Homo sapiens
ggcctctggctgccg

SEQ ID NO: 1908769 - DNA, 15 bp, Homo sapiens
gcctctggctgccgg

SEQ ID NO: 1908770 - DNA, 15 bp, Homo sapiens
cctctggctgccgga

SEQ ID NO: 1908771 - DNA, 15 bp, Homo sapiens
ctctggctgccggag

SEQ ID NO: 1908772 - DNA, 15 bp, Homo sapiens
tctggctgccggaga

SEQ ID NO: 1908773 - DNA, 15 bp, Homo sapiens
ctggctgccggagag

SEQ ID NO: 1908774 - DNA, 15 bp, Homo sapiens
tggctgccggagagg

SEQ ID NO: 1908775 - DNA, 15 bp, Homo sapiens
ggctgccggagaggg

SEQ ID NO: 1908776 - DNA, 15 bp, Homo sapiens
gctgccggagagggc

SEQ ID NO: 1908777 - DNA, 15 bp, Homo sapiens
ctgccggagagggct

SEQ ID NO: 1908778 - DNA, 15 bp, Homo sapiens
tgccggagagggcta

SEQ ID NO: 1908779 - DNA, 15 bp, Homo sapiens
gccggagagggctag

SEQ ID NO: 1908780 - DNA, 15 bp, Homo sapiens
ccggagagggctagg

SEQ ID NO: 1908781 - DNA, 15 bp, Homo sapiens
cggagagggctaggg

SEQ ID NO: 1908782 - DNA, 15 bp, Homo sapiens
ggagagggctaggga

SEQ ID NO: 1908783 - DNA, 15 bp, Homo sapiens
gagagggctagggag

SEQ ID NO: 1908784 - DNA, 15 bp, Homo sapiens
agagggctagggaga

SEQ ID NO: 1908785 - DNA, 15 bp, Homo sapiens
gagggctagggagag

SEQ ID NO: 1908786 - DNA, 15 bp, Homo sapiens
agggctagggagagc

SEQ ID NO: 1908787 - DNA, 15 bp, Homo sapiens
gggctagggagagcc

SEQ ID NO: 1908788 - DNA, 15 bp, Homo sapiens
ggctagggagagcct

SEQ ID NO: 1908789 - DNA, 15 bp, Homo sapiens
gctagggagagcctc

SEQ ID NO: 1908790 - DNA, 15 bp, Homo sapiens
ctagggagagcctca

SEQ ID NO: 1908791 - DNA, 15 bp, Homo sapiens
tagggagagcctcac

SEQ ID NO: 1908792 - DNA, 15 bp, Homo sapiens
agggagagcctcaca

SEQ ID NO: 1908793 - DNA, 15 bp, Homo sapiens
gggagagcctcacag

SEQ ID NO: 1908794 - DNA, 15 bp, Homo sapiens
ggagagcctcacagg

SEQ ID NO: 1908795 - DNA, 15 bp, Homo sapiens
gagagcctcacagga

SEQ ID NO: 1908796 - DNA, 15 bp, Homo sapiens
agagcctcacaggac

SEQ ID NO: 1908797 - DNA, 15 bp, Homo sapiens
gagcctcacaggaca

SEQ ID NO: 1908798 - DNA, 15 bp, Homo sapiens
agcctcacaggacac

SEQ ID NO: 1908799 - DNA, 15 bp, Homo sapiens
gcctcacaggacacc

SEQ ID NO: 1908800 - DNA, 15 bp, Homo sapiens
cctcacaggacacct

SEQ ID NO: 1908801 - DNA, 15 bp, Homo sapiens
ctcacaggacacctg

SEQ ID NO: 1908802 - DNA, 15 bp, Homo sapiens
tcacaggacacctgc

SEQ ID NO: 1908803 - DNA, 15 bp, Homo sapiens
cacaggacacctgcc

SEQ ID NO: 1908804 - DNA, 15 bp, Homo sapiens
acaggacacctgcct

SEQ ID NO: 1908805 - DNA, 15 bp, Homo sapiens
caggacacctgcctt

SEQ ID NO: 1908806 - DNA, 15 bp, Homo sapiens
aggacacctgccttt

SEQ ID NO: 1908807 - DNA, 15 bp, Homo sapiens
ggacacctgcctttt

SEQ ID NO: 1908808 - DNA, 15 bp, Homo sapiens
gacacctgccttttt

SEQ ID NO: 1908809 - DNA, 15 bp, Homo sapiens
acacctgcctttttc

SEQ ID NO: 1908810 - DNA, 15 bp, Homo sapiens
cacctgcctttttct

SEQ ID NO: 1908811 - DNA, 15 bp, Homo sapiens
acctgcctttttctt

SEQ ID NO: 1908812 - DNA, 15 bp, Homo sapiens
cctgcctttttcttt

SEQ ID NO: 1908813 - DNA, 15 bp, Homo sapiens
gcctttttcttttct

SEQ ID NO: 1908814 - DNA, 15 bp, Homo sapiens
cctttttcttttctt

SEQ ID NO: 1908815 - DNA, 15 bp, Homo sapiens
ctttttcttttctta

SEQ ID NO: 1908816 - DNA, 15 bp, Homo sapiens
tttttcttttcttac

SEQ ID NO: 1908817 - DNA, 15 bp, Homo sapiens
ttttcttttcttaca

SEQ ID NO: 1908818 - DNA, 15 bp, Homo sapiens
tttcttttcttacag

SEQ ID NO: 1908819 - DNA, 15 bp, Homo sapiens
ttcttttcttacaga

SEQ ID NO: 1908820 - DNA, 15 bp, Homo sapiens
tcttttcttacagac

SEQ ID NO: 1908821 - DNA, 15 bp, Homo sapiens
cttttcttacagacc

SEQ ID NO: 1908822 - DNA, 15 bp, Homo sapiens
ttttcttacagaccc

SEQ ID NO: 1908823 - DNA, 15 bp, Homo sapiens
tttcttacagaccct

SEQ ID NO: 1908824 - DNA, 15 bp, Homo sapiens
ttcttacagaccctg

SEQ ID NO: 1908825 - DNA, 15 bp, Homo sapiens
tcttacagaccctga

SEQ ID NO: 1908826 - DNA, 15 bp, Homo sapiens
cttacagaccctgag

SEQ ID NO: 1908827 - DNA, 15 bp, Homo sapiens
ttacagaccctgagg

SEQ ID NO: 1908828 - DNA, 15 bp, Homo sapiens
tacagaccctgaggg

SEQ ID NO: 1908829 - DNA, 15 bp, Homo sapiens
acagaccctgaggga

SEQ ID NO: 1908830 - DNA, 15 bp, Homo sapiens
cagaccctgagggag

SEQ ID NO: 1908831 - DNA, 15 bp, Homo sapiens
agaccctgagggagc

SEQ ID NO: 1908832 - DNA, 15 bp, Homo sapiens
gaccctgagggagca

SEQ ID NO: 1908833 - DNA, 15 bp, Homo sapiens
accctgagggagcag

SEQ ID NO: 1908834 - DNA, 15 bp, Homo sapiens
ccctgagggagcaga

SEQ ID NO: 1908835 - DNA, 15 bp, Homo sapiens
cctgagggagcagag

SEQ ID NO: 1908836 - DNA, 15 bp, Homo sapiens
ctgagggagcagaga

SEQ ID NO: 1908837 - DNA, 15 bp, Homo sapiens
tgagggagcagagat

SEQ ID NO: 1908838 - DNA, 15 bp, Homo sapiens
gagggagcagagatg

SEQ ID NO: 1908839 - DNA, 15 bp, Homo sapiens
agggagcagagatgt

SEQ ID NO: 1908840 - DNA, 15 bp, Homo sapiens
gggagcagagatgtg

SEQ ID NO: 1908841 - DNA, 15 bp, Homo sapiens
ggagcagagatgtgg

SEQ ID NO: 1908842 - DNA, 15 bp, Homo sapiens
gagcagagatgtggg

SEQ ID NO: 1908843 - DNA, 15 bp, Homo sapiens
agcagagatgtggga

SEQ ID NO: 1908844 - DNA, 15 bp, Homo sapiens
gcagagatgtgggaa

SEQ ID NO: 1908845 - DNA, 15 bp, Homo sapiens
cagagatgtgggaat

SEQ ID NO: 1908846 - DNA, 15 bp, Homo sapiens
agagatgtgggaatg

SEQ ID NO: 1908847 - DNA, 15 bp, Homo sapiens
gttgctgtactgatg

SEQ ID NO: 1908848 - DNA, 15 bp, Homo sapiens
ttgctgtactgatgt

SEQ ID NO: 1908849 - DNA, 15 bp, Homo sapiens
tgctgtactgatgtg

SEQ ID NO: 1908850 - DNA, 15 bp, Homo sapiens
gctgtactgatgtga

SEQ ID NO: 1908851 - DNA, 15 bp, Homo sapiens
ctgtactgatgtgag

SEQ ID NO: 1908852 - DNA, 15 bp, Homo sapiens
tgtactgatgtgaga

SEQ ID NO: 1908853 - DNA, 15 bp, Homo sapiens
gtactgatgtgagac

SEQ ID NO: 1908854 - DNA, 15 bp, Homo sapiens
tactgatgtgagaca

SEQ ID NO: 1908855 - DNA, 15 bp, Homo sapiens
actgatgtgagacat

SEQ ID NO: 1908856 - DNA, 15 bp, Homo sapiens
ctgatgtgagacatt

SEQ ID NO: 1908857 - DNA, 15 bp, Homo sapiens
tgatgtgagacattg

SEQ ID NO: 1908858 - DNA, 15 bp, Homo sapiens
gatgtgagacattgt

SEQ ID NO: 1908859 - DNA, 15 bp, Homo sapiens
atgtgagacattgtt

SEQ ID NO: 1908860 - DNA, 15 bp, Homo sapiens
tgtgagacattgttg

SEQ ID NO: 1908861 - DNA, 15 bp, Homo sapiens
gtgagacattgttgt

SEQ ID NO: 1908862 - DNA, 15 bp, Homo sapiens
tgagacattgttgta

SEQ ID NO: 1908863 - DNA, 15 bp, Homo sapiens
gagacattgttgtag

SEQ ID NO: 1908864 - DNA, 15 bp, Homo sapiens
agacattgttgtagt

SEQ ID NO: 1908865 - DNA, 15 bp, Homo sapiens
gacattgttgtagtc

SEQ ID NO: 1908866 - DNA, 15 bp, Homo sapiens
acattgttgtagtca

SEQ ID NO: 1908867 - DNA, 15 bp, Homo sapiens
cattgttgtagtcag

SEQ ID NO: 1908868 - DNA, 15 bp, Homo sapiens
attgttgtagtcagt

SEQ ID NO: 1908869 - DNA, 15 bp, Homo sapiens
ttgttgtagtcagtt

SEQ ID NO: 1908870 - DNA, 15 bp, Homo sapiens
tgttgtagtcagttt

SEQ ID NO: 1908871 - DNA, 15 bp, Homo sapiens
gttgtagtcagtttg

SEQ ID NO: 1908872 - DNA, 15 bp, Homo sapiens
ttgtagtcagtttgg

SEQ ID NO: 1908873 - DNA, 15 bp, Homo sapiens
tgtagtcagtttgga

SEQ ID NO: 1908874 - DNA, 15 bp, Homo sapiens
gtagtcagtttggaa

SEQ ID NO: 1908875 - DNA, 15 bp, Homo sapiens
tagtcagtttggaaa

SEQ ID NO: 1908876 - DNA, 15 bp, Homo sapiens
agtcagtttggaaaa

SEQ ID NO: 1908877 - DNA, 15 bp, Homo sapiens
gtcagtttggaaaac

SEQ ID NO: 1908878 - DNA, 15 bp, Homo sapiens
tcagtttggaaaaca

SEQ ID NO: 1908879 - DNA, 15 bp, Homo sapiens
cagtttggaaaacaa

SEQ ID NO: 1908880 - DNA, 15 bp, Homo sapiens
agtttggaaaacaat

SEQ ID NO: 1908881 - DNA, 15 bp, Homo sapiens
gtttggaaaacaatt

SEQ ID NO: 1908882 - DNA, 15 bp, Homo sapiens
tttggaaaacaattt

SEQ ID NO: 1908883 - DNA, 15 bp, Homo sapiens
ttggaaaacaatttg

SEQ ID NO: 1908884 - DNA, 15 bp, Homo sapiens
tggaaaacaatttgg

SEQ ID NO: 1908885 - DNA, 15 bp, Homo sapiens
ggaaaacaatttggc

SEQ ID NO: 1908886 - DNA, 15 bp, Homo sapiens
gaaaacaatttggca

SEQ ID NO: 1908887 - DNA, 15 bp, Homo sapiens
aaaacaatttggcag

SEQ ID NO: 1908888 - DNA, 15 bp, Homo sapiens
aaacaatttggcagt

SEQ ID NO: 1908889 - DNA, 15 bp, Homo sapiens
aacaatttggcagta

SEQ ID NO: 1908890 - DNA, 15 bp, Homo sapiens
acaatttggcagtat

SEQ ID NO: 1908891 - DNA, 15 bp, Homo sapiens
caatttggcagtata

SEQ ID NO: 1908892 - DNA, 15 bp, Homo sapiens
aatttggcagtataa

SEQ ID NO: 1908893 - DNA, 15 bp, Homo sapiens
atttggcagtataaa

SEQ ID NO: 1908894 - DNA, 15 bp, Homo sapiens
tttggcagtataaaa

SEQ ID NO: 1908895 - DNA, 15 bp, Homo sapiens
ttggcagtataaaaa

SEQ ID NO: 1908896 - DNA, 15 bp, Homo sapiens
tggcagtataaaaat

SEQ ID NO: 1908897 - DNA, 15 bp, Homo sapiens
ggcagtataaaaatg

SEQ ID NO: 1908898 - DNA, 15 bp, Homo sapiens
gcagtataaaaatga

SEQ ID NO: 1908899 - DNA, 15 bp, Homo sapiens
cagtataaaaatgaa

SEQ ID NO: 1908900 - DNA, 15 bp, Homo sapiens
agtataaaaatgaac

SEQ ID NO: 1908901 - DNA, 15 bp, Homo sapiens
gtataaaaatgaaca

SEQ ID NO: 1908902 - DNA, 15 bp, Homo sapiens
tataaaaatgaacat

SEQ ID NO: 1908903 - DNA, 15 bp, Homo sapiens
ataaaaatgaacata

SEQ ID NO: 1908904 - DNA, 15 bp, Homo sapiens
taaaaatgaacatac

SEQ ID NO: 1908905 - DNA, 15 bp, Homo sapiens
aaaaatgaacatacc

SEQ ID NO: 1908906 - DNA, 15 bp, Homo sapiens
aaaatgaacatacct

SEQ ID NO: 1908907 - DNA, 15 bp, Homo sapiens
aaatgaacatacctg

SEQ ID NO: 1908908 - DNA, 15 bp, Homo sapiens
aatgaacatacctgt

SEQ ID NO: 1908909 - DNA, 15 bp, Homo sapiens
atgaacatacctgta

SEQ ID NO: 1908910 - DNA, 15 bp, Homo sapiens
tgaacatacctgtaa

SEQ ID NO: 1908911 - DNA, 15 bp, Homo sapiens
gaacatacctgtaaa

SEQ ID NO: 1908912 - DNA, 15 bp, Homo sapiens
aacatacctgtaaac

SEQ ID NO: 1908913 - DNA, 15 bp, Homo sapiens
acatacctgtaaacc

SEQ ID NO: 1908914 - DNA, 15 bp, Homo sapiens
catacctgtaaacca

SEQ ID NO: 1908915 - DNA, 15 bp, Homo sapiens
atacctgtaaaccaa

SEQ ID NO: 1908916 - DNA, 15 bp, Homo sapiens
tacctgtaaaccaac

SEQ ID NO: 1908917 - DNA, 15 bp, Homo sapiens
acctgtaaaccaacg

SEQ ID NO: 1908918 - DNA, 15 bp, Homo sapiens
cctgtaaaccaacgg

SEQ ID NO: 1908919 - DNA, 15 bp, Homo sapiens
ctgtaaaccaacggt

SEQ ID NO: 1908920 - DNA, 15 bp, Homo sapiens
tgtaaaccaacggtg

SEQ ID NO: 1908921 - DNA, 15 bp, Homo sapiens
gtaaaccaacggtgc

SEQ ID NO: 1908922 - DNA, 15 bp, Homo sapiens
taaaccaacggtgcc

SEQ ID NO: 1908923 - DNA, 15 bp, Homo sapiens
aaaccaacggtgcca

SEQ ID NO: 1908924 - DNA, 15 bp, Homo sapiens
aaccaacggtgccat

SEQ ID NO: 1908925 - DNA, 15 bp, Homo sapiens
accaacggtgccatt

SEQ ID NO: 1908926 - DNA, 15 bp, Homo sapiens
ccaacggtgccattc

SEQ ID NO: 1908927 - DNA, 15 bp, Homo sapiens
caacggtgccattcc

SEQ ID NO: 1908928 - DNA, 15 bp, Homo sapiens
aacggtgccattccc

SEQ ID NO: 1908929 - DNA, 15 bp, Homo sapiens
acggtgccattccca

SEQ ID NO: 1908930 - DNA, 15 bp, Homo sapiens
cggtgccattcccag

SEQ ID NO: 1908931 - DNA, 15 bp, Homo sapiens
ggtgccattcccagg

SEQ ID NO: 1908932 - DNA, 15 bp, Homo sapiens
gtgccattcccagga

SEQ ID NO: 1908933 - DNA, 15 bp, Homo sapiens
tgccattcccaggat

SEQ ID NO: 1908934 - DNA, 15 bp, Homo sapiens
gccattcccaggatt

SEQ ID NO: 1908935 - DNA, 15 bp, Homo sapiens
ccattcccaggattt

SEQ ID NO: 1908936 - DNA, 15 bp, Homo sapiens
cattcccaggattta

SEQ ID NO: 1908937 - DNA, 15 bp, Homo sapiens
attcccaggatttaa

SEQ ID NO: 1908938 - DNA, 15 bp, Homo sapiens
ttcccaggatttaat

SEQ ID NO: 1908939 - DNA, 15 bp, Homo sapiens
tcccaggatttaata

SEQ ID NO: 1908940 - DNA, 15 bp, Homo sapiens
cccaggatttaatag

SEQ ID NO: 1908941 - DNA, 15 bp, Homo sapiens
ccaggatttaatagc

SEQ ID NO: 1908942 - DNA, 15 bp, Homo sapiens
caggatttaatagca

SEQ ID NO: 1908943 - DNA, 15 bp, Homo sapiens
aggatttaatagcag

SEQ ID NO: 1908944 - DNA, 15 bp, Homo sapiens
ggatttaatagcaga

SEQ ID NO: 1908945 - DNA, 15 bp, Homo sapiens
gatttaatagcagag

SEQ ID NO: 1908946 - DNA, 15 bp, Homo sapiens
atttaatagcagaga

SEQ ID NO: 1908947 - DNA, 15 bp, Homo sapiens
tttaatagcagagaa

SEQ ID NO: 1908948 - DNA, 15 bp, Homo sapiens
ttaatagcagagaaa

SEQ ID NO: 1908949 - DNA, 15 bp, Homo sapiens
taatagcagagaaat

SEQ ID NO: 1908950 - DNA, 15 bp, Homo sapiens
aatagcagagaaatc

SEQ ID NO: 1908951 - DNA, 15 bp, Homo sapiens
atagcagagaaatct

SEQ ID NO: 1908952 - DNA, 15 bp, Homo sapiens
tagcagagaaatctt

SEQ ID NO: 1908953 - DNA, 15 bp, Homo sapiens
agcagagaaatcttt

SEQ ID NO: 1908954 - DNA, 15 bp, Homo sapiens
gcagagaaatctttg

SEQ ID NO: 1908955 - DNA, 15 bp, Homo sapiens
cagagaaatctttgc

SEQ ID NO: 1908956 - DNA, 15 bp, Homo sapiens
agagaaatctttgca

SEQ ID NO: 1908957 - DNA, 15 bp, Homo sapiens
gagaaatctttgcat

SEQ ID NO: 1908958 - DNA, 15 bp, Homo sapiens
agaaatctttgcata

SEQ ID NO: 1908959 - DNA, 15 bp, Homo sapiens
gaaatctttgcatat

SEQ ID NO: 1908960 - DNA, 15 bp, Homo sapiens
aaatctttgcatata

SEQ ID NO: 1908961 - DNA, 15 bp, Homo sapiens
aatctttgcatatat

SEQ ID NO: 1908962 - DNA, 15 bp, Homo sapiens
atctttgcatatatg

SEQ ID NO: 1908963 - DNA, 15 bp, Homo sapiens
tctttgcatatatgt

SEQ ID NO: 1908964 - DNA, 15 bp, Homo sapiens
ctttgcatatatgtc

SEQ ID NO: 1908965 - DNA, 15 bp, Homo sapiens
tttgcatatatgtcc

SEQ ID NO: 1908966 - DNA, 15 bp, Homo sapiens
ttgcatatatgtccc

SEQ ID NO: 1908967 - DNA, 15 bp, Homo sapiens
tgcatatatgtccca

SEQ ID NO: 1908968 - DNA, 15 bp, Homo sapiens
gcatatatgtcccag

SEQ ID NO: 1908969 - DNA, 15 bp, Homo sapiens
catatatgtcccagg

SEQ ID NO: 1908970 - DNA, 15 bp, Homo sapiens
atatatgtcccagga

SEQ ID NO: 1908971 - DNA, 15 bp, Homo sapiens
tatatgtcccaggag

SEQ ID NO: 1908972 - DNA, 15 bp, Homo sapiens
atatgtcccaggaga

SEQ ID NO: 1908973 - DNA, 15 bp, Homo sapiens
tatgtcccaggagac

SEQ ID NO: 1908974 - DNA, 15 bp, Homo sapiens
atgtcccaggagaca

SEQ ID NO: 1908975 - DNA, 15 bp, Homo sapiens
tgtcccaggagacat

SEQ ID NO: 1908976 - DNA, 15 bp, Homo sapiens
gtcccaggagacata

SEQ ID NO: 1908977 - DNA, 15 bp, Homo sapiens
tcccaggagacatat

SEQ ID NO: 1908978 - DNA, 15 bp, Homo sapiens
cccaggagacatata

SEQ ID NO: 1908979 - DNA, 15 bp, Homo sapiens
ccaggagacatatat

SEQ ID NO: 1908980 - DNA, 15 bp, Homo sapiens
caggagacatatata

SEQ ID NO: 1908981 - DNA, 15 bp, Homo sapiens
aggagacatatataa

SEQ ID NO: 1908982 - DNA, 15 bp, Homo sapiens
ggagacatatataaa

SEQ ID NO: 1908983 - DNA, 15 bp, Homo sapiens
gagacatatataaag

SEQ ID NO: 1908984 - DNA, 15 bp, Homo sapiens
agacatatataaagt

SEQ ID NO: 1908985 - DNA, 15 bp, Homo sapiens
gacatatataaagtg

SEQ ID NO: 1908986 - DNA, 15 bp, Homo sapiens
acatatataaagtgg

SEQ ID NO: 1908987 - DNA, 15 bp, Homo sapiens
catatataaagtgga

SEQ ID NO: 1908988 - DNA, 15 bp, Homo sapiens
atatataaagtggac

SEQ ID NO: 1908989 - DNA, 15 bp, Homo sapiens
tatataaagtggaca

SEQ ID NO: 1908990 - DNA, 15 bp, Homo sapiens
atataaagtggacat

SEQ ID NO: 1908991 - DNA, 15 bp, Homo sapiens
tataaagtggacatc

SEQ ID NO: 1908992 - DNA, 15 bp, Homo sapiens
ataaagtggacatca

SEQ ID NO: 1908993 - DNA, 15 bp, Homo sapiens
taaagtggacatcag

SEQ ID NO: 1908994 - DNA, 15 bp, Homo sapiens
aaagtggacatcagc

SEQ ID NO: 1908995 - DNA, 15 bp, Homo sapiens
aagtggacatcagcc

SEQ ID NO: 1908996 - DNA, 15 bp, Homo sapiens
agtggacatcagcct

SEQ ID NO: 1908997 - DNA, 15 bp, Homo sapiens
gtggacatcagcctg

SEQ ID NO: 1908998 - DNA, 15 bp, Homo sapiens
tggacatcagcctga

SEQ ID NO: 1908999 - DNA, 15 bp, Homo sapiens
ggacatcagcctgat

SEQ ID NO: 1909000 - DNA, 15 bp, Homo sapiens
gacatcagcctgatt

SEQ ID NO: 1909001 - DNA, 15 bp, Homo sapiens
acatcagcctgatta

SEQ ID NO: 1909002 - DNA, 15 bp, Homo sapiens
catcagcctgattat

SEQ ID NO: 1909003 - DNA, 15 bp, Homo sapiens
atcagcctgattata

SEQ ID NO: 1909004 - DNA, 15 bp, Homo sapiens
tcagcctgattataa

SEQ ID NO: 1909005 - DNA, 15 bp, Homo sapiens
cagcctgattataag

SEQ ID NO: 1909006 - DNA, 15 bp, Homo sapiens
agcctgattataagc

SEQ ID NO: 1909007 - DNA, 15 bp, Homo sapiens
gcctgattataagct

SEQ ID NO: 1909008 - DNA, 15 bp, Homo sapiens
cctgattataagctc

SEQ ID NO: 1909009 - DNA, 15 bp, Homo sapiens
ctgattataagctct

SEQ ID NO: 1909010 - DNA, 15 bp, Homo sapiens
tgattataagctcta

SEQ ID NO: 1909011 - DNA, 15 bp, Homo sapiens
gattataagctctaa

SEQ ID NO: 1909012 - DNA, 15 bp, Homo sapiens
attataagctctaaa

SEQ ID NO: 1909013 - DNA, 15 bp, Homo sapiens
ttataagctctaaat

SEQ ID NO: 1909014 - DNA, 15 bp, Homo sapiens
tataagctctaaatg

SEQ ID NO: 1909015 - DNA, 15 bp, Homo sapiens
ataagctctaaatgc

SEQ ID NO: 1909016 - DNA, 15 bp, Homo sapiens
taagctctaaatgca

SEQ ID NO: 1909017 - DNA, 15 bp, Homo sapiens
aagctctaaatgcaa

SEQ ID NO: 1909018 - DNA, 15 bp, Homo sapiens
agctctaaatgcaac

SEQ ID NO: 1909019 - DNA, 15 bp, Homo sapiens
gctctaaatgcaacc

SEQ ID NO: 1909020 - DNA, 15 bp, Homo sapiens
ctctaaatgcaaccc

SEQ ID NO: 1909021 - DNA, 15 bp, Homo sapiens
tctaaatgcaaccca

SEQ ID NO: 1909022 - DNA, 15 bp, Homo sapiens
ctaaatgcaacccaa

SEQ ID NO: 1909023 - DNA, 15 bp, Homo sapiens
taaatgcaacccaaa

SEQ ID NO: 1909024 - DNA, 15 bp, Homo sapiens
aaatgcaacccaaat

SEQ ID NO: 1909025 - DNA, 15 bp, Homo sapiens
aatgcaacccaaata

SEQ ID NO: 1909026 - DNA, 15 bp, Homo sapiens
atgcaacccaaataa

SEQ ID NO: 1909027 - DNA, 15 bp, Homo sapiens
tgcaacccaaataaa

SEQ ID NO: 1909028 - DNA, 15 bp, Homo sapiens
gcaacccaaataaat

SEQ ID NO: 1909029 - DNA, 15 bp, Homo sapiens
caacccaaataaata

SEQ ID NO: 1909030 - DNA, 15 bp, Homo sapiens
aacccaaataaatac

SEQ ID NO: 1909031 - DNA, 15 bp, Homo sapiens
acccaaataaatacc

SEQ ID NO: 1909032 - DNA, 15 bp, Homo sapiens
cccaaataaataccc

SEQ ID NO: 1909033 - DNA, 15 bp, Homo sapiens
ccaaataaataccca

SEQ ID NO: 1909034 - DNA, 15 bp, Homo sapiens
caaataaatacccat

SEQ ID NO: 1909035 - DNA, 15 bp, Homo sapiens
aaataaatacccatc

SEQ ID NO: 1909036 - DNA, 15 bp, Homo sapiens
aataaatacccatca

SEQ ID NO: 1909037 - DNA, 15 bp, Homo sapiens
ataaatacccatcaa

SEQ ID NO: 1909038 - DNA, 15 bp, Homo sapiens
taaatacccatcaac

SEQ ID NO: 1909039 - DNA, 15 bp, Homo sapiens
aaatacccatcaaca

SEQ ID NO: 1909040 - DNA, 15 bp, Homo sapiens
aatacccatcaacat

SEQ ID NO: 1909041 - DNA, 15 bp, Homo sapiens
atacccatcaacatt

SEQ ID NO: 1909042 - DNA, 15 bp, Homo sapiens
tacccatcaacatta

SEQ ID NO: 1909043 - DNA, 15 bp, Homo sapiens
acccatcaacattag

SEQ ID NO: 1909044 - DNA, 15 bp, Homo sapiens
cccatcaacattaga

SEQ ID NO: 1909045 - DNA, 15 bp, Homo sapiens
ccatcaacattagaa

SEQ ID NO: 1909046 - DNA, 15 bp, Homo sapiens
catcaacattagaat

SEQ ID NO: 1909047 - DNA, 15 bp, Homo sapiens
atcaacattagaatg

SEQ ID NO: 1909048 - DNA, 15 bp, Homo sapiens
tcaacattagaatga

SEQ ID NO: 1909049 - DNA, 15 bp, Homo sapiens
caacattagaatgaa

SEQ ID NO: 1909050 - DNA, 15 bp, Homo sapiens
aacattagaatgaat

SEQ ID NO: 1909051 - DNA, 15 bp, Homo sapiens
acattagaatgaata

SEQ ID NO: 1909052 - DNA, 15 bp, Homo sapiens
cattagaatgaatac

SEQ ID NO: 1909053 - DNA, 15 bp, Homo sapiens
attagaatgaataca

SEQ ID NO: 1909054 - DNA, 15 bp, Homo sapiens
ttagaatgaatacat

SEQ ID NO: 1909055 - DNA, 15 bp, Homo sapiens
tagaatgaatacatt

SEQ ID NO: 1909056 - DNA, 15 bp, Homo sapiens
agaatgaatacatta

SEQ ID NO: 1909057 - DNA, 15 bp, Homo sapiens
aatgaatacattatt

SEQ ID NO: 1909058 - DNA, 15 bp, Homo sapiens
atgaatacattattt

SEQ ID NO: 1909059 - DNA, 15 bp, Homo sapiens
tgaatacattatttg

SEQ ID NO: 1909060 - DNA, 15 bp, Homo sapiens
gaatacattatttgt

SEQ ID NO: 1909061 - DNA, 15 bp, Homo sapiens
aatacattatttgtg

SEQ ID NO: 1909062 - DNA, 15 bp, Homo sapiens
atacattatttgtgg

SEQ ID NO: 1909063 - DNA, 15 bp, Homo sapiens
tacattatttgtggt

SEQ ID NO: 1909064 - DNA, 15 bp, Homo sapiens
acattatttgtggta

SEQ ID NO: 1909065 - DNA, 15 bp, Homo sapiens
cattatttgtggtat

SEQ ID NO: 1909066 - DNA, 15 bp, Homo sapiens
attatttgtggtata

SEQ ID NO: 1909067 - DNA, 15 bp, Homo sapiens
ttatttgtggtatag

SEQ ID NO: 1909068 - DNA, 15 bp, Homo sapiens
tatttgtggtataga

SEQ ID NO: 1909069 - DNA, 15 bp, Homo sapiens
atttgtggtatagac

SEQ ID NO: 1909070 - DNA, 15 bp, Homo sapiens
tttgtggtatagaca

SEQ ID NO: 1909071 - DNA, 15 bp, Homo sapiens
ttgtggtatagacac

SEQ ID NO: 1909072 - DNA, 15 bp, Homo sapiens
tgtggtatagacaca

SEQ ID NO: 1909073 - DNA, 15 bp, Homo sapiens
gtggtatagacacaa

SEQ ID NO: 1909074 - DNA, 15 bp, Homo sapiens
tggtatagacacaat

SEQ ID NO: 1909075 - DNA, 15 bp, Homo sapiens
ggtatagacacaatg

SEQ ID NO: 1909076 - DNA, 15 bp, Homo sapiens
gtatagacacaatgg

SEQ ID NO: 1909077 - DNA, 15 bp, Homo sapiens
tatagacacaatgga

SEQ ID NO: 1909078 - DNA, 15 bp, Homo sapiens
atagacacaatggaa

SEQ ID NO: 1909079 - DNA, 15 bp, Homo sapiens
tagacacaatggaat

SEQ ID NO: 1909080 - DNA, 15 bp, Homo sapiens
agacacaatggaata

SEQ ID NO: 1909081 - DNA, 15 bp, Homo sapiens
gacacaatggaatac

SEQ ID NO: 1909082 - DNA, 15 bp, Homo sapiens
acacaatggaatact

SEQ ID NO: 1909083 - DNA, 15 bp, Homo sapiens
cacaatggaatactc

SEQ ID NO: 1909084 - DNA, 15 bp, Homo sapiens
acaatggaatactcc

SEQ ID NO: 1909085 - DNA, 15 bp, Homo sapiens
caatggaatactccg

SEQ ID NO: 1909086 - DNA, 15 bp, Homo sapiens
aatggaatactccgc

SEQ ID NO: 1909087 - DNA, 15 bp, Homo sapiens
atggaatactccgca

SEQ ID NO: 1909088 - DNA, 15 bp, Homo sapiens
tggaatactccgcag

SEQ ID NO: 1909089 - DNA, 15 bp, Homo sapiens
ggaatactccgcagc

SEQ ID NO: 1909090 - DNA, 15 bp, Homo sapiens
gaatactccgcagct

SEQ ID NO: 1909091 - DNA, 15 bp, Homo sapiens
aatactccgcagctg

SEQ ID NO: 1909092 - DNA, 15 bp, Homo sapiens
atactccgcagctgt

SEQ ID NO: 1909093 - DNA, 15 bp, Homo sapiens
tactccgcagctgtg

SEQ ID NO: 1909094 - DNA, 15 bp, Homo sapiens
actccgcagctgtga

SEQ ID NO: 1909095 - DNA, 15 bp, Homo sapiens
ctccgcagctgtgaa

SEQ ID NO: 1909096 - DNA, 15 bp, Homo sapiens
tccgcagctgtgaaa

SEQ ID NO: 1909097 - DNA, 15 bp, Homo sapiens
ccgcagctgtgaaaa

SEQ ID NO: 1909098 - DNA, 15 bp, Homo sapiens
cgcagctgtgaaaag

SEQ ID NO: 1909099 - DNA, 15 bp, Homo sapiens
gcagctgtgaaaagg

SEQ ID NO: 1909100 - DNA, 15 bp, Homo sapiens
cagctgtgaaaagga

SEQ ID NO: 1909101 - DNA, 15 bp, Homo sapiens
agctgtgaaaaggaa

SEQ ID NO: 1909102 - DNA, 15 bp, Homo sapiens
gctgtgaaaaggaat

SEQ ID NO: 1909103 - DNA, 15 bp, Homo sapiens
ctgtgaaaaggaata

SEQ ID NO: 1909104 - DNA, 15 bp, Homo sapiens
tgtgaaaaggaatac

SEQ ID NO: 1909105 - DNA, 15 bp, Homo sapiens
gtgaaaaggaataca

SEQ ID NO: 1909106 - DNA, 15 bp, Homo sapiens
tgaaaaggaatacac

SEQ ID NO: 1909107 - DNA, 15 bp, Homo sapiens
gaaaaggaatacact

SEQ ID NO: 1909108 - DNA, 15 bp, Homo sapiens
aaaaggaatacactg

SEQ ID NO: 1909109 - DNA, 15 bp, Homo sapiens
aaaggaatacactgc

SEQ ID NO: 1909110 - DNA, 15 bp, Homo sapiens
aaggaatacactgca

SEQ ID NO: 1909111 - DNA, 15 bp, Homo sapiens
aggaatacactgcag

SEQ ID NO: 1909112 - DNA, 15 bp, Homo sapiens
ggaatacactgcaga

SEQ ID NO: 1909113 - DNA, 15 bp, Homo sapiens
gaatacactgcagat

SEQ ID NO: 1909114 - DNA, 15 bp, Homo sapiens
aatacactgcagata

SEQ ID NO: 1909115 - DNA, 15 bp, Homo sapiens
atacactgcagatac

SEQ ID NO: 1909116 - DNA, 15 bp, Homo sapiens
tacactgcagataca

SEQ ID NO: 1909117 - DNA, 15 bp, Homo sapiens
acactgcagatacac

SEQ ID NO: 1909118 - DNA, 15 bp, Homo sapiens
cactgcagatacaca

SEQ ID NO: 1909119 - DNA, 15 bp, Homo sapiens
actgcagatacacat

SEQ ID NO: 1909120 - DNA, 15 bp, Homo sapiens
ctgcagatacacata

SEQ ID NO: 1909121 - DNA, 15 bp, Homo sapiens
tgcagatacacataa

SEQ ID NO: 1909122 - DNA, 15 bp, Homo sapiens
gcagatacacataac

SEQ ID NO: 1909123 - DNA, 15 bp, Homo sapiens
cagatacacataacc

SEQ ID NO: 1909124 - DNA, 15 bp, Homo sapiens
agatacacataacca

SEQ ID NO: 1909125 - DNA, 15 bp, Homo sapiens
gatacacataaccat

SEQ ID NO: 1909126 - DNA, 15 bp, Homo sapiens
atacacataaccatg

SEQ ID NO: 1909127 - DNA, 15 bp, Homo sapiens
tacacataaccatgt

SEQ ID NO: 1909128 - DNA, 15 bp, Homo sapiens
acacataaccatgtg

SEQ ID NO: 1909129 - DNA, 15 bp, Homo sapiens
cacataaccatgtgg

SEQ ID NO: 1909130 - DNA, 15 bp, Homo sapiens
acataaccatgtgga

SEQ ID NO: 1909131 - DNA, 15 bp, Homo sapiens
cataaccatgtggat

SEQ ID NO: 1909132 - DNA, 15 bp, Homo sapiens
ataaccatgtggatt

SEQ ID NO: 1909133 - DNA, 15 bp, Homo sapiens
taaccatgtggattc

SEQ ID NO: 1909134 - DNA, 15 bp, Homo sapiens
aaccatgtggattca

SEQ ID NO: 1909135 - DNA, 15 bp, Homo sapiens
accatgtggattcat

SEQ ID NO: 1909136 - DNA, 15 bp, Homo sapiens
ccatgtggattcatt

SEQ ID NO: 1909137 - DNA, 15 bp, Homo sapiens
catgtggattcattt

SEQ ID NO: 1909138 - DNA, 15 bp, Homo sapiens
atgtggattcatttc

SEQ ID NO: 1909139 - DNA, 15 bp, Homo sapiens
tgtggattcatttca

SEQ ID NO: 1909140 - DNA, 15 bp, Homo sapiens
gtggattcatttcac

SEQ ID NO: 1909141 - DNA, 15 bp, Homo sapiens
tggattcatttcaca

SEQ ID NO: 1909142 - DNA, 15 bp, Homo sapiens
ggattcatttcacat

SEQ ID NO: 1909143 - DNA, 15 bp, Homo sapiens
gattcatttcacatc

SEQ ID NO: 1909144 - DNA, 15 bp, Homo sapiens
attcatttcacatca

SEQ ID NO: 1909145 - DNA, 15 bp, Homo sapiens
ttcatttcacatcaa

SEQ ID NO: 1909146 - DNA, 15 bp, Homo sapiens
tcatttcacatcaag

SEQ ID NO: 1909147 - DNA, 15 bp, Homo sapiens
catttcacatcaagt

SEQ ID NO: 1909148 - DNA, 15 bp, Homo sapiens
atttcacatcaagtg

SEQ ID NO: 1909149 - DNA, 15 bp, Homo sapiens
tttcacatcaagtga

SEQ ID NO: 1909150 - DNA, 15 bp, Homo sapiens
ttcacatcaagtgaa

SEQ ID NO: 1909151 - DNA, 15 bp, Homo sapiens
tcacatcaagtgaaa

SEQ ID NO: 1909152 - DNA, 15 bp, Homo sapiens
cacatcaagtgaaaa

SEQ ID NO: 1909153 - DNA, 15 bp, Homo sapiens
acatcaagtgaaaag

SEQ ID NO: 1909154 - DNA, 15 bp, Homo sapiens
catcaagtgaaaagt

SEQ ID NO: 1909155 - DNA, 15 bp, Homo sapiens
atcaagtgaaaagtg

SEQ ID NO: 1909156 - DNA, 15 bp, Homo sapiens
tcaagtgaaaagtga

SEQ ID NO: 1909157 - DNA, 15 bp, Homo sapiens
caagtgaaaagtgaa

SEQ ID NO: 1909158 - DNA, 15 bp, Homo sapiens
aagtgaaaagtgaat

SEQ ID NO: 1909159 - DNA, 15 bp, Homo sapiens
agtgaaaagtgaatc

SEQ ID NO: 1909160 - DNA, 15 bp, Homo sapiens
gtgaaaagtgaatcc

SEQ ID NO: 1909161 - DNA, 15 bp, Homo sapiens
tgaaaagtgaatccc

SEQ ID NO: 1909162 - DNA, 15 bp, Homo sapiens
gaaaagtgaatccca

SEQ ID NO: 1909163 - DNA, 15 bp, Homo sapiens
aaaagtgaatcccaa

SEQ ID NO: 1909164 - DNA, 15 bp, Homo sapiens
aaagtgaatcccaaa

SEQ ID NO: 1909165 - DNA, 15 bp, Homo sapiens
aagtgaatcccaaaa

SEQ ID NO: 1909166 - DNA, 15 bp, Homo sapiens
agtgaatcccaaaag

SEQ ID NO: 1909167 - DNA, 15 bp, Homo sapiens
gtgaatcccaaaaga

SEQ ID NO: 1909168 - DNA, 15 bp, Homo sapiens
tgaatcccaaaagaa

SEQ ID NO: 1909169 - DNA, 15 bp, Homo sapiens
gaatcccaaaagaat

SEQ ID NO: 1909170 - DNA, 15 bp, Homo sapiens
aatcccaaaagaatt

SEQ ID NO: 1909171 - DNA, 15 bp, Homo sapiens
atcccaaaagaattc

SEQ ID NO: 1909172 - DNA, 15 bp, Homo sapiens
tcccaaaagaattca

SEQ ID NO: 1909173 - DNA, 15 bp, Homo sapiens
cccaaaagaattcat

SEQ ID NO: 1909174 - DNA, 15 bp, Homo sapiens
ccaaaagaattcatt

SEQ ID NO: 1909175 - DNA, 15 bp, Homo sapiens
caaaagaattcattg

SEQ ID NO: 1909176 - DNA, 15 bp, Homo sapiens
aaaagaattcattgg

SEQ ID NO: 1909177 - DNA, 15 bp, Homo sapiens
aaagaattcattgga

SEQ ID NO: 1909178 - DNA, 15 bp, Homo sapiens
aagaattcattggag

SEQ ID NO: 1909179 - DNA, 15 bp, Homo sapiens
agaattcattggagt

SEQ ID NO: 1909180 - DNA, 15 bp, Homo sapiens
gaattcattggagtc

SEQ ID NO: 1909181 - DNA, 15 bp, Homo sapiens
aattcattggagtcc

SEQ ID NO: 1909182 - DNA, 15 bp, Homo sapiens
attcattggagtcca

SEQ ID NO: 1909183 - DNA, 15 bp, Homo sapiens
ttcattggagtccat

SEQ ID NO: 1909184 - DNA, 15 bp, Homo sapiens
tcattggagtccata

SEQ ID NO: 1909185 - DNA, 15 bp, Homo sapiens
cattggagtccataa

SEQ ID NO: 1909186 - DNA, 15 bp, Homo sapiens
attggagtccataag

SEQ ID NO: 1909187 - DNA, 15 bp, Homo sapiens
ttggagtccataagt

SEQ ID NO: 1909188 - DNA, 15 bp, Homo sapiens
tggagtccataagtg

SEQ ID NO: 1909189 - DNA, 15 bp, Homo sapiens
ggagtccataagtgt

SEQ ID NO: 1909190 - DNA, 15 bp, Homo sapiens
gagtccataagtgta

SEQ ID NO: 1909191 - DNA, 15 bp, Homo sapiens
agtccataagtgtaa

SEQ ID NO: 1909192 - DNA, 15 bp, Homo sapiens
gtccataagtgtaag

SEQ ID NO: 1909193 - DNA, 15 bp, Homo sapiens
tccataagtgtaagg

SEQ ID NO: 1909194 - DNA, 15 bp, Homo sapiens
ccataagtgtaaggt

SEQ ID NO: 1909195 - DNA, 15 bp, Homo sapiens
cataagtgtaaggtt

SEQ ID NO: 1909196 - DNA, 15 bp, Homo sapiens
ataagtgtaaggttc

SEQ ID NO: 1909197 - DNA, 15 bp, Homo sapiens
taagtgtaaggttca

SEQ ID NO: 1909198 - DNA, 15 bp, Homo sapiens
aagtgtaaggttcac

SEQ ID NO: 1909199 - DNA, 15 bp, Homo sapiens
agtgtaaggttcaca

SEQ ID NO: 1909200 - DNA, 15 bp, Homo sapiens
gtgtaaggttcacaa

SEQ ID NO: 1909201 - DNA, 15 bp, Homo sapiens
tgtaaggttcacaaa

SEQ ID NO: 1909202 - DNA, 15 bp, Homo sapiens
gtaaggttcacaaat

SEQ ID NO: 1909203 - DNA, 15 bp, Homo sapiens
taaggttcacaaatg

SEQ ID NO: 1909204 - DNA, 15 bp, Homo sapiens
aaggttcacaaatgt

SEQ ID NO: 1909205 - DNA, 15 bp, Homo sapiens
aggttcacaaatgtc

SEQ ID NO: 1909206 - DNA, 15 bp, Homo sapiens
ggttcacaaatgtcc

SEQ ID NO: 1909207 - DNA, 15 bp, Homo sapiens
gttcacaaatgtccc

SEQ ID NO: 1909208 - DNA, 15 bp, Homo sapiens
ttcacaaatgtccca

SEQ ID NO: 1909209 - DNA, 15 bp, Homo sapiens
tcacaaatgtcccaa

SEQ ID NO: 1909210 - DNA, 15 bp, Homo sapiens
cacaaatgtcccaaa

SEQ ID NO: 1909211 - DNA, 15 bp, Homo sapiens
acaaatgtcccaaac

SEQ ID NO: 1909212 - DNA, 15 bp, Homo sapiens
caaatgtcccaaact

SEQ ID NO: 1909213 - DNA, 15 bp, Homo sapiens
aaatgtcccaaacta

SEQ ID NO: 1909214 - DNA, 15 bp, Homo sapiens
aatgtcccaaactaa

SEQ ID NO: 1909215 - DNA, 15 bp, Homo sapiens
atgtcccaaactaaa

SEQ ID NO: 1909216 - DNA, 15 bp, Homo sapiens
tgtcccaaactaaac

SEQ ID NO: 1909217 - DNA, 15 bp, Homo sapiens
gtcccaaactaaaca

SEQ ID NO: 1909218 - DNA, 15 bp, Homo sapiens
tcccaaactaaacaa

SEQ ID NO: 1909219 - DNA, 15 bp, Homo sapiens
cccaaactaaacaat

SEQ ID NO: 1909220 - DNA, 15 bp, Homo sapiens
ccaaactaaacaata

SEQ ID NO: 1909221 - DNA, 15 bp, Homo sapiens
caaactaaacaatac

SEQ ID NO: 1909222 - DNA, 15 bp, Homo sapiens
aaactaaacaatacc

SEQ ID NO: 1909223 - DNA, 15 bp, Homo sapiens
aactaaacaatacct

SEQ ID NO: 1909224 - DNA, 15 bp, Homo sapiens
actaaacaatacctg

SEQ ID NO: 1909225 - DNA, 15 bp, Homo sapiens
ctaaacaatacctgc

SEQ ID NO: 1909226 - DNA, 15 bp, Homo sapiens
taaacaatacctgca

SEQ ID NO: 1909227 - DNA, 15 bp, Homo sapiens
aaacaatacctgcat

SEQ ID NO: 1909228 - DNA, 15 bp, Homo sapiens
aacaatacctgcatt

SEQ ID NO: 1909229 - DNA, 15 bp, Homo sapiens
acaatacctgcattg

SEQ ID NO: 1909230 - DNA, 15 bp, Homo sapiens
caatacctgcattgc

SEQ ID NO: 1909231 - DNA, 15 bp, Homo sapiens
aatacctgcattgct

SEQ ID NO: 1909232 - DNA, 15 bp, Homo sapiens
atacctgcattgctt

SEQ ID NO: 1909233 - DNA, 15 bp, Homo sapiens
tacctgcattgctta

SEQ ID NO: 1909234 - DNA, 15 bp, Homo sapiens
acctgcattgcttag

SEQ ID NO: 1909235 - DNA, 15 bp, Homo sapiens
cctgcattgcttaga

SEQ ID NO: 1909236 - DNA, 15 bp, Homo sapiens
ctgcattgcttagat

SEQ ID NO: 1909237 - DNA, 15 bp, Homo sapiens
tgcattgcttagata

SEQ ID NO: 1909238 - DNA, 15 bp, Homo sapiens
gcattgcttagataa

SEQ ID NO: 1909239 - DNA, 15 bp, Homo sapiens
cattgcttagataaa

SEQ ID NO: 1909240 - DNA, 15 bp, Homo sapiens
attgcttagataaac

SEQ ID NO: 1909241 - DNA, 15 bp, Homo sapiens
ttgcttagataaaca

SEQ ID NO: 1909242 - DNA, 15 bp, Homo sapiens
tgcttagataaacaa

SEQ ID NO: 1909243 - DNA, 15 bp, Homo sapiens
gcttagataaacaaa

SEQ ID NO: 1909244 - DNA, 15 bp, Homo sapiens
cttagataaacaaat

SEQ ID NO: 1909245 - DNA, 15 bp, Homo sapiens
ttagataaacaaata

SEQ ID NO: 1909246 - DNA, 15 bp, Homo sapiens
tagataaacaaatat

SEQ ID NO: 1909247 - DNA, 15 bp, Homo sapiens
agataaacaaatatg

SEQ ID NO: 1909248 - DNA, 15 bp, Homo sapiens
gataaacaaatatgg

SEQ ID NO: 1909249 - DNA, 15 bp, Homo sapiens
ataaacaaatatggt

SEQ ID NO: 1909250 - DNA, 15 bp, Homo sapiens
taaacaaatatggta

SEQ ID NO: 1909251 - DNA, 15 bp, Homo sapiens
aaacaaatatggtaa

SEQ ID NO: 1909252 - DNA, 15 bp, Homo sapiens
aacaaatatggtaaa

SEQ ID NO: 1909253 - DNA, 15 bp, Homo sapiens
acaaatatggtaaaa

SEQ ID NO: 1909254 - DNA, 15 bp, Homo sapiens
caaatatggtaaaac

SEQ ID NO: 1909255 - DNA, 15 bp, Homo sapiens
aaatatggtaaaact

SEQ ID NO: 1909256 - DNA, 15 bp, Homo sapiens
aatatggtaaaactg

SEQ ID NO: 1909257 - DNA, 15 bp, Homo sapiens
atatggtaaaactgt

SEQ ID NO: 1909258 - DNA, 15 bp, Homo sapiens
tatggtaaaactgta

SEQ ID NO: 1909259 - DNA, 15 bp, Homo sapiens
atggtaaaactgtaa

SEQ ID NO: 1909260 - DNA, 15 bp, Homo sapiens
tggtaaaactgtaaa

SEQ ID NO: 1909261 - DNA, 15 bp, Homo sapiens
ggtaaaactgtaaaa

SEQ ID NO: 1909262 - DNA, 15 bp, Homo sapiens
gtaaaactgtaaaaa

SEQ ID NO: 1909263 - DNA, 15 bp, Homo sapiens
taaaactgtaaaaaa

SEQ ID NO: 1909264 - DNA, 15 bp, Homo sapiens
aaaactgtaaaaaaa

SEQ ID NO: 1909265 - DNA, 15 bp, Homo sapiens
aaactgtaaaaaaac

SEQ ID NO: 1909266 - DNA, 15 bp, Homo sapiens
aactgtaaaaaaaca

SEQ ID NO: 1909267 - DNA, 15 bp, Homo sapiens
actgtaaaaaaacaa

SEQ ID NO: 1909268 - DNA, 15 bp, Homo sapiens
ctgtaaaaaaacaaa

SEQ ID NO: 1909269 - DNA, 15 bp, Homo sapiens
tgtaaaaaaacaaaa

SEQ ID NO: 1909270 - DNA, 15 bp, Homo sapiens
gtaaaaaaacaaaac

SEQ ID NO: 1909271 - DNA, 15 bp, Homo sapiens
taaaaaaacaaaaca

SEQ ID NO: 1909272 - DNA, 15 bp, Homo sapiens
acaaaacaaaacaag

SEQ ID NO: 1909273 - DNA, 15 bp, Homo sapiens
caaaacaaaacaaga

SEQ ID NO: 1909274 - DNA, 15 bp, Homo sapiens
aaaacaaaacaagac

SEQ ID NO: 1909275 - DNA, 15 bp, Homo sapiens
aaacaaaacaagaca

SEQ ID NO: 1909276 - DNA, 15 bp, Homo sapiens
aacaaaacaagacaa

SEQ ID NO: 1909277 - DNA, 15 bp, Homo sapiens
acaaaacaagacaaa

SEQ ID NO: 1909278 - DNA, 15 bp, Homo sapiens
caaaacaagacaaaa

SEQ ID NO: 1909279 - DNA, 15 bp, Homo sapiens
aaaacaagacaaaaa

SEQ ID NO: 1909280 - DNA, 15 bp, Homo sapiens
aaacaagacaaaaag

SEQ ID NO: 1909281 - DNA, 15 bp, Homo sapiens
aacaagacaaaaagg

SEQ ID NO: 1909282 - DNA, 15 bp, Homo sapiens
acaagacaaaaaggg

SEQ ID NO: 1909283 - DNA, 15 bp, Homo sapiens
caagacaaaaagggc

SEQ ID NO: 1909284 - DNA, 15 bp, Homo sapiens
aagacaaaaagggct

SEQ ID NO: 1909285 - DNA, 15 bp, Homo sapiens
agacaaaaagggcta

SEQ ID NO: 1909286 - DNA, 15 bp, Homo sapiens
gacaaaaagggctag

SEQ ID NO: 1909287 - DNA, 15 bp, Homo sapiens
acaaaaagggctagg

SEQ ID NO: 1909288 - DNA, 15 bp, Homo sapiens
caaaaagggctagga

SEQ ID NO: 1909289 - DNA, 15 bp, Homo sapiens
aaaaagggctaggaa

SEQ ID NO: 1909290 - DNA, 15 bp, Homo sapiens
aaaagggctaggaaa

SEQ ID NO: 1909291 - DNA, 15 bp, Homo sapiens
aaagggctaggaaat

SEQ ID NO: 1909292 - DNA, 15 bp, Homo sapiens
aagggctaggaaatg

SEQ ID NO: 1909293 - DNA, 15 bp, Homo sapiens
agggctaggaaatga

SEQ ID NO: 1909294 - DNA, 15 bp, Homo sapiens
gggctaggaaatgat

SEQ ID NO: 1909295 - DNA, 15 bp, Homo sapiens
ggctaggaaatgata

SEQ ID NO: 1909296 - DNA, 15 bp, Homo sapiens
gctaggaaatgataa

SEQ ID NO: 1909297 - DNA, 15 bp, Homo sapiens
ctaggaaatgataaa

SEQ ID NO: 1909298 - DNA, 15 bp, Homo sapiens
taggaaatgataaac

SEQ ID NO: 1909299 - DNA, 15 bp, Homo sapiens
aggaaatgataaacc

SEQ ID NO: 1909300 - DNA, 15 bp, Homo sapiens
ggaaatgataaaccc

SEQ ID NO: 1909301 - DNA, 15 bp, Homo sapiens
gaaatgataaaccca

SEQ ID NO: 1909302 - DNA, 15 bp, Homo sapiens
aaatgataaacccaa

SEQ ID NO: 1909303 - DNA, 15 bp, Homo sapiens
aatgataaacccaaa

SEQ ID NO: 1909304 - DNA, 15 bp, Homo sapiens
atgataaacccaaaa

SEQ ID NO: 1909305 - DNA, 15 bp, Homo sapiens
tgataaacccaaaag

SEQ ID NO: 1909306 - DNA, 15 bp, Homo sapiens
gataaacccaaaaga

SEQ ID NO: 1909307 - DNA, 15 bp, Homo sapiens
ataaacccaaaagac

SEQ ID NO: 1909308 - DNA, 15 bp, Homo sapiens
taaacccaaaagaca

SEQ ID NO: 1909309 - DNA, 15 bp, Homo sapiens
aaacccaaaagacaa

SEQ ID NO: 1909310 - DNA, 15 bp, Homo sapiens
aacccaaaagacaaa

SEQ ID NO: 1909311 - DNA, 15 bp, Homo sapiens
acccaaaagacaaaa

SEQ ID NO: 1909312 - DNA, 15 bp, Homo sapiens
cccaaaagacaaaat

SEQ ID NO: 1909313 - DNA, 15 bp, Homo sapiens
ccaaaagacaaaata

SEQ ID NO: 1909314 - DNA, 15 bp, Homo sapiens
caaaagacaaaatag

SEQ ID NO: 1909315 - DNA, 15 bp, Homo sapiens
aaaagacaaaatagc

SEQ ID NO: 1909316 - DNA, 15 bp, Homo sapiens
aaagacaaaatagca

SEQ ID NO: 1909317 - DNA, 15 bp, Homo sapiens
aagacaaaatagcag

SEQ ID NO: 1909318 - DNA, 15 bp, Homo sapiens
agacaaaatagcagt

SEQ ID NO: 1909319 - DNA, 15 bp, Homo sapiens
gacaaaatagcagtt

SEQ ID NO: 1909320 - DNA, 15 bp, Homo sapiens
acaaaatagcagtta

SEQ ID NO: 1909321 - DNA, 15 bp, Homo sapiens
caaaatagcagttat

SEQ ID NO: 1909322 - DNA, 15 bp, Homo sapiens
aaaatagcagttatt

SEQ ID NO: 1909323 - DNA, 15 bp, Homo sapiens
aaatagcagttattt

SEQ ID NO: 1909324 - DNA, 15 bp, Homo sapiens
aatagcagttatttc

SEQ ID NO: 1909325 - DNA, 15 bp, Homo sapiens
atagcagttatttct

SEQ ID NO: 1909326 - DNA, 15 bp, Homo sapiens
tagcagttatttctg

SEQ ID NO: 1909327 - DNA, 15 bp, Homo sapiens
agcagttatttctga

SEQ ID NO: 1909328 - DNA, 15 bp, Homo sapiens
gcagttatttctgag

SEQ ID NO: 1909329 - DNA, 15 bp, Homo sapiens
cagttatttctgagg

SEQ ID NO: 1909330 - DNA, 15 bp, Homo sapiens
agttatttctgaggg

SEQ ID NO: 1909331 - DNA, 15 bp, Homo sapiens
gttatttctgaggga

SEQ ID NO: 1909332 - DNA, 15 bp, Homo sapiens
ttatttctgagggag

SEQ ID NO: 1909333 - DNA, 15 bp, Homo sapiens
tatttctgagggagg

SEQ ID NO: 1909334 - DNA, 15 bp, Homo sapiens
atttctgagggagga

SEQ ID NO: 1909335 - DNA, 15 bp, Homo sapiens
tttctgagggaggag

SEQ ID NO: 1909336 - DNA, 15 bp, Homo sapiens
ttctgagggaggagg

SEQ ID NO: 1909337 - DNA, 15 bp, Homo sapiens
tctgagggaggaggg

SEQ ID NO: 1909338 - DNA, 15 bp, Homo sapiens
ctgagggaggaggga

SEQ ID NO: 1909339 - DNA, 15 bp, Homo sapiens
tgagggaggagggaa

SEQ ID NO: 1909340 - DNA, 15 bp, Homo sapiens
gagggaggagggaag

SEQ ID NO: 1909341 - DNA, 15 bp, Homo sapiens
agggaggagggaagg

SEQ ID NO: 1909342 - DNA, 15 bp, Homo sapiens
gggaggagggaaggg

SEQ ID NO: 1909343 - DNA, 15 bp, Homo sapiens
ggaggagggaagggg

SEQ ID NO: 1909344 - DNA, 15 bp, Homo sapiens
gaggagggaagggga

SEQ ID NO: 1909345 - DNA, 15 bp, Homo sapiens
aggagggaaggggat

SEQ ID NO: 1909346 - DNA, 15 bp, Homo sapiens
ggagggaaggggatg

SEQ ID NO: 1909347 - DNA, 15 bp, Homo sapiens
gagggaaggggatgg

SEQ ID NO: 1909348 - DNA, 15 bp, Homo sapiens
agggaaggggatggg

SEQ ID NO: 1909349 - DNA, 15 bp, Homo sapiens
gggaaggggatgggg

SEQ ID NO: 1909350 - DNA, 15 bp, Homo sapiens
ggaaggggatggggt

SEQ ID NO: 1909351 - DNA, 15 bp, Homo sapiens
gaaggggatggggtt

SEQ ID NO: 1909352 - DNA, 15 bp, Homo sapiens
aaggggatggggttg

SEQ ID NO: 1909353 - DNA, 15 bp, Homo sapiens
aggggatggggttgg

SEQ ID NO: 1909354 - DNA, 15 bp, Homo sapiens
ggggatggggttggg

SEQ ID NO: 1909355 - DNA, 15 bp, Homo sapiens
gggatggggttgggg

SEQ ID NO: 1909356 - DNA, 15 bp, Homo sapiens
ggatggggttgggga

SEQ ID NO: 1909357 - DNA, 15 bp, Homo sapiens
gatggggttggggaa

SEQ ID NO: 1909358 - DNA, 15 bp, Homo sapiens
atggggttggggaag

SEQ ID NO: 1909359 - DNA, 15 bp, Homo sapiens
tggggttggggaagg

SEQ ID NO: 1909360 - DNA, 15 bp, Homo sapiens
ggggttggggaaggg

SEQ ID NO: 1909361 - DNA, 15 bp, Homo sapiens
gggttggggaagggc

SEQ ID NO: 1909362 - DNA, 15 bp, Homo sapiens
ggttggggaagggca

SEQ ID NO: 1909363 - DNA, 15 bp, Homo sapiens
gttggggaagggcac

SEQ ID NO: 1909364 - DNA, 15 bp, Homo sapiens
ttggggaagggcacc

SEQ ID NO: 1909365 - DNA, 15 bp, Homo sapiens
tggggaagggcaccc

SEQ ID NO: 1909366 - DNA, 15 bp, Homo sapiens
ggggaagggcaccca

SEQ ID NO: 1909367 - DNA, 15 bp, Homo sapiens
gggaagggcacccag

SEQ ID NO: 1909368 - DNA, 15 bp, Homo sapiens
ggaagggcacccaga

SEQ ID NO: 1909369 - DNA, 15 bp, Homo sapiens
gaagggcacccagag

SEQ ID NO: 1909370 - DNA, 15 bp, Homo sapiens
aagggcacccagaga

SEQ ID NO: 1909371 - DNA, 15 bp, Homo sapiens
agggcacccagagaa

SEQ ID NO: 1909372 - DNA, 15 bp, Homo sapiens
gggcacccagagaat

SEQ ID NO: 1909373 - DNA, 15 bp, Homo sapiens
ggcacccagagaatt

SEQ ID NO: 1909374 - DNA, 15 bp, Homo sapiens
gcacccagagaattt

SEQ ID NO: 1909375 - DNA, 15 bp, Homo sapiens
cacccagagaatttt

SEQ ID NO: 1909376 - DNA, 15 bp, Homo sapiens
acccagagaatttta

SEQ ID NO: 1909377 - DNA, 15 bp, Homo sapiens
cccagagaattttag

SEQ ID NO: 1909378 - DNA, 15 bp, Homo sapiens
ccagagaattttagg

SEQ ID NO: 1909379 - DNA, 15 bp, Homo sapiens
cagagaattttagga

SEQ ID NO: 1909380 - DNA, 15 bp, Homo sapiens
agagaattttaggag

SEQ ID NO: 1909381 - DNA, 15 bp, Homo sapiens
gagaattttaggagt

SEQ ID NO: 1909382 - DNA, 15 bp, Homo sapiens
agaattttaggagtg

SEQ ID NO: 1909383 - DNA, 15 bp, Homo sapiens
gttatctaagagata

SEQ ID NO: 1909384 - DNA, 15 bp, Homo sapiens
ttatctaagagatat

SEQ ID NO: 1909385 - DNA, 15 bp, Homo sapiens
tatctaagagatatg

SEQ ID NO: 1909386 - DNA, 15 bp, Homo sapiens
atctaagagatatga

SEQ ID NO: 1909387 - DNA, 15 bp, Homo sapiens
tctaagagatatgac

SEQ ID NO: 1909388 - DNA, 15 bp, Homo sapiens
ctaagagatatgacc

SEQ ID NO: 1909389 - DNA, 15 bp, Homo sapiens
taagagatatgacca

SEQ ID NO: 1909390 - DNA, 15 bp, Homo sapiens
aagagatatgaccag

SEQ ID NO: 1909391 - DNA, 15 bp, Homo sapiens
agagatatgaccagg

SEQ ID NO: 1909392 - DNA, 15 bp, Homo sapiens
gagatatgaccaggc

SEQ ID NO: 1909393 - DNA, 15 bp, Homo sapiens
agatatgaccaggcc

SEQ ID NO: 1909394 - DNA, 15 bp, Homo sapiens
gatatgaccaggccg

SEQ ID NO: 1909395 - DNA, 15 bp, Homo sapiens
atatgaccaggccgg

SEQ ID NO: 1909396 - DNA, 15 bp, Homo sapiens
tatgaccaggccgga

SEQ ID NO: 1909397 - DNA, 15 bp, Homo sapiens
atgaccaggccggaa

SEQ ID NO: 1909398 - DNA, 15 bp, Homo sapiens
tgaccaggccggaat

SEQ ID NO: 1909399 - DNA, 15 bp, Homo sapiens
gaccaggccggaata

SEQ ID NO: 1909400 - DNA, 15 bp, Homo sapiens
accaggccggaatag

SEQ ID NO: 1909401 - DNA, 15 bp, Homo sapiens
ccaggccggaataga

SEQ ID NO: 1909402 - DNA, 15 bp, Homo sapiens
caggccggaatagaa

SEQ ID NO: 1909403 - DNA, 15 bp, Homo sapiens
aggccggaatagaat

SEQ ID NO: 1909404 - DNA, 15 bp, Homo sapiens
ggccggaatagaatg

SEQ ID NO: 1909405 - DNA, 15 bp, Homo sapiens
gccggaatagaatgc

SEQ ID NO: 1909406 - DNA, 15 bp, Homo sapiens
ccggaatagaatgct

SEQ ID NO: 1909407 - DNA, 15 bp, Homo sapiens
cggaatagaatgctc

SEQ ID NO: 1909408 - DNA, 15 bp, Homo sapiens
ggaatagaatgctca

SEQ ID NO: 1909409 - DNA, 15 bp, Homo sapiens
gaatagaatgctcag

SEQ ID NO: 1909410 - DNA, 15 bp, Homo sapiens
aatagaatgctcaga

SEQ ID NO: 1909411 - DNA, 15 bp, Homo sapiens
atagaatgctcagac

SEQ ID NO: 1909412 - DNA, 15 bp, Homo sapiens
tagaatgctcagacc

SEQ ID NO: 1909413 - DNA, 15 bp, Homo sapiens
agaatgctcagacca

SEQ ID NO: 1909414 - DNA, 15 bp, Homo sapiens
gaatgctcagaccac

SEQ ID NO: 1909415 - DNA, 15 bp, Homo sapiens
aatgctcagaccacg

SEQ ID NO: 1909416 - DNA, 15 bp, Homo sapiens
atgctcagaccacgt

SEQ ID NO: 1909417 - DNA, 15 bp, Homo sapiens
tgctcagaccacgtg

SEQ ID NO: 1909418 - DNA, 15 bp, Homo sapiens
gctcagaccacgtgg

SEQ ID NO: 1909419 - DNA, 15 bp, Homo sapiens
ctcagaccacgtgga

SEQ ID NO: 1909420 - DNA, 15 bp, Homo sapiens
tcagaccacgtggag

SEQ ID NO: 1909421 - DNA, 15 bp, Homo sapiens
cagaccacgtggagg

SEQ ID NO: 1909422 - DNA, 15 bp, Homo sapiens
agaccacgtggaggc

SEQ ID NO: 1909423 - DNA, 15 bp, Homo sapiens
gaccacgtggaggct

SEQ ID NO: 1909424 - DNA, 15 bp, Homo sapiens
accacgtggaggctg

SEQ ID NO: 1909425 - DNA, 15 bp, Homo sapiens
ccacgtggaggctgt

SEQ ID NO: 1909426 - DNA, 15 bp, Homo sapiens
cacgtggaggctgtt

SEQ ID NO: 1909427 - DNA, 15 bp, Homo sapiens
acgtggaggctgtta

SEQ ID NO: 1909428 - DNA, 15 bp, Homo sapiens
cgtggaggctgttaa

SEQ ID NO: 1909429 - DNA, 15 bp, Homo sapiens
gtggaggctgttaaa

SEQ ID NO: 1909430 - DNA, 15 bp, Homo sapiens
tggaggctgttaaac

SEQ ID NO: 1909431 - DNA, 15 bp, Homo sapiens
ggaggctgttaaact

SEQ ID NO: 1909432 - DNA, 15 bp, Homo sapiens
gaggctgttaaactt

SEQ ID NO: 1909433 - DNA, 15 bp, Homo sapiens
aggctgttaaacttt

SEQ ID NO: 1909434 - DNA, 15 bp, Homo sapiens
ggctgttaaactttt

SEQ ID NO: 1909435 - DNA, 15 bp, Homo sapiens
gctgttaaactttta

SEQ ID NO: 1909436 - DNA, 15 bp, Homo sapiens
ctgttaaacttttac

SEQ ID NO: 1909437 - DNA, 15 bp, Homo sapiens
tgttaaacttttaca

SEQ ID NO: 1909438 - DNA, 15 bp, Homo sapiens
gttaaacttttacat

SEQ ID NO: 1909439 - DNA, 15 bp, Homo sapiens
ttaaacttttacata

SEQ ID NO: 1909440 - DNA, 15 bp, Homo sapiens
taaacttttacataa

SEQ ID NO: 1909441 - DNA, 15 bp, Homo sapiens
aaacttttacataat

SEQ ID NO: 1909442 - DNA, 15 bp, Homo sapiens
aacttttacataatc

SEQ ID NO: 1909443 - DNA, 15 bp, Homo sapiens
acttttacataatct

SEQ ID NO: 1909444 - DNA, 15 bp, Homo sapiens
cttttacataatcta

SEQ ID NO: 1909445 - DNA, 15 bp, Homo sapiens
ttttacataatctag

SEQ ID NO: 1909446 - DNA, 15 bp, Homo sapiens
tttacataatctagg

SEQ ID NO: 1909447 - DNA, 15 bp, Homo sapiens
ttacataatctaggg

SEQ ID NO: 1909448 - DNA, 15 bp, Homo sapiens
tacataatctaggga

SEQ ID NO: 1909449 - DNA, 15 bp, Homo sapiens
acataatctagggaa

SEQ ID NO: 1909450 - DNA, 15 bp, Homo sapiens
cataatctagggaaa

SEQ ID NO: 1909451 - DNA, 15 bp, Homo sapiens
ataatctagggaaag

SEQ ID NO: 1909452 - DNA, 15 bp, Homo sapiens
taatctagggaaaga

SEQ ID NO: 1909453 - DNA, 15 bp, Homo sapiens
aatctagggaaagaa

SEQ ID NO: 1909454 - DNA, 15 bp, Homo sapiens
atctagggaaagaag

SEQ ID NO: 1909455 - DNA, 15 bp, Homo sapiens
tctagggaaagaagg

SEQ ID NO: 1909456 - DNA, 15 bp, Homo sapiens
ctagggaaagaaggg

SEQ ID NO: 1909457 - DNA, 15 bp, Homo sapiens
tagggaaagaaggga

SEQ ID NO: 1909458 - DNA, 15 bp, Homo sapiens
agggaaagaagggac

SEQ ID NO: 1909459 - DNA, 15 bp, Homo sapiens
gggaaagaagggaca

SEQ ID NO: 1909460 - DNA, 15 bp, Homo sapiens
ggaaagaagggacac

SEQ ID NO: 1909461 - DNA, 15 bp, Homo sapiens
gaaagaagggacaca

SEQ ID NO: 1909462 - DNA, 15 bp, Homo sapiens
aaagaagggacacaa

SEQ ID NO: 1909463 - DNA, 15 bp, Homo sapiens
aagaagggacacaag

SEQ ID NO: 1909464 - DNA, 15 bp, Homo sapiens
agaagggacacaagg

SEQ ID NO: 1909465 - DNA, 15 bp, Homo sapiens
gaagggacacaaggt

SEQ ID NO: 1909466 - DNA, 15 bp, Homo sapiens
aagggacacaaggtg

SEQ ID NO: 1909467 - DNA, 15 bp, Homo sapiens
agggacacaaggtgg

SEQ ID NO: 1909468 - DNA, 15 bp, Homo sapiens
gggacacaaggtggc

SEQ ID NO: 1909469 - DNA, 15 bp, Homo sapiens
ggacacaaggtggca

SEQ ID NO: 1909470 - DNA, 15 bp, Homo sapiens
gacacaaggtggcat

SEQ ID NO: 1909471 - DNA, 15 bp, Homo sapiens
acacaaggtggcatt

SEQ ID NO: 1909472 - DNA, 15 bp, Homo sapiens
cacaaggtggcatta

SEQ ID NO: 1909473 - DNA, 15 bp, Homo sapiens
acaaggtggcattag

SEQ ID NO: 1909474 - DNA, 15 bp, Homo sapiens
caaggtggcattagt

SEQ ID NO: 1909475 - DNA, 15 bp, Homo sapiens
aaggtggcattagtc

SEQ ID NO: 1909476 - DNA, 15 bp, Homo sapiens
aggtggcattagtct

SEQ ID NO: 1909477 - DNA, 15 bp, Homo sapiens
ggtggcattagtcta

SEQ ID NO: 1909478 - DNA, 15 bp, Homo sapiens
gtggcattagtctag

SEQ ID NO: 1909479 - DNA, 15 bp, Homo sapiens
tggcattagtctagg

SEQ ID NO: 1909480 - DNA, 15 bp, Homo sapiens
ggcattagtctaggg

SEQ ID NO: 1909481 - DNA, 15 bp, Homo sapiens
gcattagtctagggt

SEQ ID NO: 1909482 - DNA, 15 bp, Homo sapiens
cattagtctagggtc

SEQ ID NO: 1909483 - DNA, 15 bp, Homo sapiens
attagtctagggtca

SEQ ID NO: 1909484 - DNA, 15 bp, Homo sapiens
ttagtctagggtcag

SEQ ID NO: 1909485 - DNA, 15 bp, Homo sapiens
tagtctagggtcagg

SEQ ID NO: 1909486 - DNA, 15 bp, Homo sapiens
agtctagggtcaggt

SEQ ID NO: 1909487 - DNA, 15 bp, Homo sapiens
gtctagggtcaggtg

SEQ ID NO: 1909488 - DNA, 15 bp, Homo sapiens
tctagggtcaggtgg

SEQ ID NO: 1909489 - DNA, 15 bp, Homo sapiens
ctagggtcaggtggg

SEQ ID NO: 1909490 - DNA, 15 bp, Homo sapiens
tagggtcaggtggga

SEQ ID NO: 1909491 - DNA, 15 bp, Homo sapiens
agggtcaggtgggaa

SEQ ID NO: 1909492 - DNA, 15 bp, Homo sapiens
gggtcaggtgggaaa

SEQ ID NO: 1909493 - DNA, 15 bp, Homo sapiens
ggtcaggtgggaaaa

SEQ ID NO: 1909494 - DNA, 15 bp, Homo sapiens
gtcaggtgggaaaag

SEQ ID NO: 1909495 - DNA, 15 bp, Homo sapiens
tcaggtgggaaaagg

SEQ ID NO: 1909496 - DNA, 15 bp, Homo sapiens
caggtgggaaaaggt

SEQ ID NO: 1909497 - DNA, 15 bp, Homo sapiens
aggtgggaaaaggtt

SEQ ID NO: 1909498 - DNA, 15 bp, Homo sapiens
ggtgggaaaaggtta

SEQ ID NO: 1909499 - DNA, 15 bp, Homo sapiens
gtgggaaaaggttat

SEQ ID NO: 1909500 - DNA, 15 bp, Homo sapiens
tgggaaaaggttatg

SEQ ID NO: 1909501 - DNA, 15 bp, Homo sapiens
gggaaaaggttatgc

SEQ ID NO: 1909502 - DNA, 15 bp, Homo sapiens
ggaaaaggttatgct

SEQ ID NO: 1909503 - DNA, 15 bp, Homo sapiens
gaaaaggttatgctg

SEQ ID NO: 1909504 - DNA, 15 bp, Homo sapiens
aaaaggttatgctga

SEQ ID NO: 1909505 - DNA, 15 bp, Homo sapiens
aaaggttatgctgaa

SEQ ID NO: 1909506 - DNA, 15 bp, Homo sapiens
aaggttatgctgaaa

SEQ ID NO: 1909507 - DNA, 15 bp, Homo sapiens
aggttatgctgaaaa

SEQ ID NO: 1909508 - DNA, 15 bp, Homo sapiens
ggttatgctgaaaag

SEQ ID NO: 1909509 - DNA, 15 bp, Homo sapiens
gttatgctgaaaagt

SEQ ID NO: 1909510 - DNA, 15 bp, Homo sapiens
ttatgctgaaaagtc

SEQ ID NO: 1909511 - DNA, 15 bp, Homo sapiens
tatgctgaaaagtct

SEQ ID NO: 1909512 - DNA, 15 bp, Homo sapiens
atgctgaaaagtctc

SEQ ID NO: 1909513 - DNA, 15 bp, Homo sapiens
tgctgaaaagtctct

SEQ ID NO: 1909514 - DNA, 15 bp, Homo sapiens
gctgaaaagtctctg

SEQ ID NO: 1909515 - DNA, 15 bp, Homo sapiens
ctgaaaagtctctgc

SEQ ID NO: 1909516 - DNA, 15 bp, Homo sapiens
tgaaaagtctctgca

SEQ ID NO: 1909517 - DNA, 15 bp, Homo sapiens
gaaaagtctctgcag

SEQ ID NO: 1909518 - DNA, 15 bp, Homo sapiens
aaaagtctctgcagc

SEQ ID NO: 1909519 - DNA, 15 bp, Homo sapiens
aaagtctctgcagct

SEQ ID NO: 1909520 - DNA, 15 bp, Homo sapiens
aagtctctgcagctc

SEQ ID NO: 1909521 - DNA, 15 bp, Homo sapiens
agtctctgcagctca

SEQ ID NO: 1909522 - DNA, 15 bp, Homo sapiens
gtctctgcagctcag

SEQ ID NO: 1909523 - DNA, 15 bp, Homo sapiens
tctctgcagctcagg

SEQ ID NO: 1909524 - DNA, 15 bp, Homo sapiens
ctctgcagctcagga

SEQ ID NO: 1909525 - DNA, 15 bp, Homo sapiens
tctgcagctcaggac

SEQ ID NO: 1909526 - DNA, 15 bp, Homo sapiens
ctgcagctcaggaca

SEQ ID NO: 1909527 - DNA, 15 bp, Homo sapiens
tgcagctcaggacag

SEQ ID NO: 1909528 - DNA, 15 bp, Homo sapiens
gcagctcaggacagc

SEQ ID NO: 1909529 - DNA, 15 bp, Homo sapiens
cagctcaggacagct

SEQ ID NO: 1909530 - DNA, 15 bp, Homo sapiens
agctcaggacagctt

SEQ ID NO: 1909531 - DNA, 15 bp, Homo sapiens
gctcaggacagcttt

SEQ ID NO: 1909532 - DNA, 15 bp, Homo sapiens
ctcaggacagctttg

SEQ ID NO: 1909533 - DNA, 15 bp, Homo sapiens
tcaggacagctttgt

SEQ ID NO: 1909534 - DNA, 15 bp, Homo sapiens
caggacagctttgtg

SEQ ID NO: 1909535 - DNA, 15 bp, Homo sapiens
aggacagctttgtgc

SEQ ID NO: 1909536 - DNA, 15 bp, Homo sapiens
ggacagctttgtgca

SEQ ID NO: 1909537 - DNA, 15 bp, Homo sapiens
gacagctttgtgcaa

SEQ ID NO: 1909538 - DNA, 15 bp, Homo sapiens
acagctttgtgcaaa

SEQ ID NO: 1909539 - DNA, 15 bp, Homo sapiens
cagctttgtgcaaag

SEQ ID NO: 1909540 - DNA, 15 bp, Homo sapiens
agctttgtgcaaaga

SEQ ID NO: 1909541 - DNA, 15 bp, Homo sapiens
gctttgtgcaaagaa

SEQ ID NO: 1909542 - DNA, 15 bp, Homo sapiens
ctttgtgcaaagaac

SEQ ID NO: 1909543 - DNA, 15 bp, Homo sapiens
tttgtgcaaagaact

SEQ ID NO: 1909544 - DNA, 15 bp, Homo sapiens
ttgtgcaaagaactg

SEQ ID NO: 1909545 - DNA, 15 bp, Homo sapiens
tgtgcaaagaactga

SEQ ID NO: 1909546 - DNA, 15 bp, Homo sapiens
gtgcaaagaactgaa

SEQ ID NO: 1909547 - DNA, 15 bp, Homo sapiens
tgcaaagaactgaag

SEQ ID NO: 1909548 - DNA, 15 bp, Homo sapiens
gcaaagaactgaagt

SEQ ID NO: 1909549 - DNA, 15 bp, Homo sapiens
caaagaactgaagtt

SEQ ID NO: 1909550 - DNA, 15 bp, Homo sapiens
aaagaactgaagttc

SEQ ID NO: 1909551 - DNA, 15 bp, Homo sapiens
aagaactgaagttca

SEQ ID NO: 1909552 - DNA, 15 bp, Homo sapiens
agaactgaagttcac

SEQ ID NO: 1909553 - DNA, 15 bp, Homo sapiens
gaactgaagttcaca

SEQ ID NO: 1909554 - DNA, 15 bp, Homo sapiens
aactgaagttcacag

SEQ ID NO: 1909555 - DNA, 15 bp, Homo sapiens
actgaagttcacagc

SEQ ID NO: 1909556 - DNA, 15 bp, Homo sapiens
ctgaagttcacagct

SEQ ID NO: 1909557 - DNA, 15 bp, Homo sapiens
tgaagttcacagctg

SEQ ID NO: 1909558 - DNA, 15 bp, Homo sapiens
gaagttcacagctgc

SEQ ID NO: 1909559 - DNA, 15 bp, Homo sapiens
aagttcacagctgct

SEQ ID NO: 1909560 - DNA, 15 bp, Homo sapiens
agttcacagctgcta

SEQ ID NO: 1909561 - DNA, 15 bp, Homo sapiens
gttcacagctgctag

SEQ ID NO: 1909562 - DNA, 15 bp, Homo sapiens
ttcacagctgctagt

SEQ ID NO: 1909563 - DNA, 15 bp, Homo sapiens
tcacagctgctagtg

SEQ ID NO: 1909564 - DNA, 15 bp, Homo sapiens
cacagctgctagtgc

SEQ ID NO: 1909565 - DNA, 15 bp, Homo sapiens
acagctgctagtgcc

SEQ ID NO: 1909566 - DNA, 15 bp, Homo sapiens
cagctgctagtgcct

SEQ ID NO: 1909567 - DNA, 15 bp, Homo sapiens
agctgctagtgcctg

SEQ ID NO: 1909568 - DNA, 15 bp, Homo sapiens
gctgctagtgcctgg

SEQ ID NO: 1909569 - DNA, 15 bp, Homo sapiens
ctgctagtgcctggg

SEQ ID NO: 1909570 - DNA, 15 bp, Homo sapiens
tgctagtgcctggga

SEQ ID NO: 1909571 - DNA, 15 bp, Homo sapiens
gctagtgcctgggag

SEQ ID NO: 1909572 - DNA, 15 bp, Homo sapiens
ctagtgcctgggaga

SEQ ID NO: 1909573 - DNA, 15 bp, Homo sapiens
tagtgcctgggagat

SEQ ID NO: 1909574 - DNA, 15 bp, Homo sapiens
agtgcctgggagatc

SEQ ID NO: 1909575 - DNA, 15 bp, Homo sapiens
gtgcctgggagatca

SEQ ID NO: 1909576 - DNA, 15 bp, Homo sapiens
tgcctgggagatcaa

SEQ ID NO: 1909577 - DNA, 15 bp, Homo sapiens
gcctgggagatcaaa

SEQ ID NO: 1909578 - DNA, 15 bp, Homo sapiens
cctgggagatcaaat

SEQ ID NO: 1909579 - DNA, 15 bp, Homo sapiens
ctgggagatcaaata

SEQ ID NO: 1909580 - DNA, 15 bp, Homo sapiens
tgggagatcaaatag

SEQ ID NO: 1909581 - DNA, 15 bp, Homo sapiens
gggagatcaaatagt

SEQ ID NO: 1909582 - DNA, 15 bp, Homo sapiens
ggagatcaaatagta

SEQ ID NO: 1909583 - DNA, 15 bp, Homo sapiens
gagatcaaatagtat

SEQ ID NO: 1909584 - DNA, 15 bp, Homo sapiens
agatcaaatagtata

SEQ ID NO: 1909585 - DNA, 15 bp, Homo sapiens
gatcaaatagtataa

SEQ ID NO: 1909586 - DNA, 15 bp, Homo sapiens
atcaaatagtataaa

SEQ ID NO: 1909587 - DNA, 15 bp, Homo sapiens
tcaaatagtataaat

SEQ ID NO: 1909588 - DNA, 15 bp, Homo sapiens
caaatagtataaatg

SEQ ID NO: 1909589 - DNA, 15 bp, Homo sapiens
aaatagtataaatga

SEQ ID NO: 1909590 - DNA, 15 bp, Homo sapiens
aatagtataaatgag

SEQ ID NO: 1909591 - DNA, 15 bp, Homo sapiens
atagtataaatgagg

SEQ ID NO: 1909592 - DNA, 15 bp, Homo sapiens
tagtataaatgaggg

SEQ ID NO: 1909593 - DNA, 15 bp, Homo sapiens
agtataaatgagggc

SEQ ID NO: 1909594 - DNA, 15 bp, Homo sapiens
gtataaatgagggca

SEQ ID NO: 1909595 - DNA, 15 bp, Homo sapiens
tataaatgagggcag

SEQ ID NO: 1909596 - DNA, 15 bp, Homo sapiens
ataaatgagggcaga

SEQ ID NO: 1909597 - DNA, 15 bp, Homo sapiens
taaatgagggcagac

SEQ ID NO: 1909598 - DNA, 15 bp, Homo sapiens
aaatgagggcagaca

SEQ ID NO: 1909599 - DNA, 15 bp, Homo sapiens
aatgagggcagacaa

SEQ ID NO: 1909600 - DNA, 15 bp, Homo sapiens
atgagggcagacaac

SEQ ID NO: 1909601 - DNA, 15 bp, Homo sapiens
tgagggcagacaacc

SEQ ID NO: 1909602 - DNA, 15 bp, Homo sapiens
gagggcagacaaccc

SEQ ID NO: 1909603 - DNA, 15 bp, Homo sapiens
agggcagacaaccct

SEQ ID NO: 1909604 - DNA, 15 bp, Homo sapiens
gggcagacaaccctg

SEQ ID NO: 1909605 - DNA, 15 bp, Homo sapiens
ggcagacaaccctga

SEQ ID NO: 1909606 - DNA, 15 bp, Homo sapiens
gcagacaaccctgag

SEQ ID NO: 1909607 - DNA, 15 bp, Homo sapiens
cagacaaccctgagg

SEQ ID NO: 1909608 - DNA, 15 bp, Homo sapiens
agacaaccctgaggg

SEQ ID NO: 1909609 - DNA, 15 bp, Homo sapiens
gacaaccctgagggg

SEQ ID NO: 1909610 - DNA, 15 bp, Homo sapiens
acaaccctgaggggc

SEQ ID NO: 1909611 - DNA, 15 bp, Homo sapiens
caaccctgaggggca

SEQ ID NO: 1909612 - DNA, 15 bp, Homo sapiens
aaccctgaggggcag

SEQ ID NO: 1909613 - DNA, 15 bp, Homo sapiens
accctgaggggcaga

SEQ ID NO: 1909614 - DNA, 15 bp, Homo sapiens
ccctgaggggcagat

SEQ ID NO: 1909615 - DNA, 15 bp, Homo sapiens
cctgaggggcagatg

SEQ ID NO: 1909616 - DNA, 15 bp, Homo sapiens
ctgaggggcagatgg

SEQ ID NO: 1909617 - DNA, 15 bp, Homo sapiens
tgaggggcagatgga

SEQ ID NO: 1909618 - DNA, 15 bp, Homo sapiens
gaggggcagatggag

SEQ ID NO: 1909619 - DNA, 15 bp, Homo sapiens
aggggcagatggagc

SEQ ID NO: 1909620 - DNA, 15 bp, Homo sapiens
ggggcagatggagct

SEQ ID NO: 1909621 - DNA, 15 bp, Homo sapiens
gggcagatggagctt

SEQ ID NO: 1909622 - DNA, 15 bp, Homo sapiens
ggcagatggagcttt

SEQ ID NO: 1909623 - DNA, 15 bp, Homo sapiens
gcagatggagctttc

SEQ ID NO: 1909624 - DNA, 15 bp, Homo sapiens
cagatggagctttcc

SEQ ID NO: 1909625 - DNA, 15 bp, Homo sapiens
agatggagctttcca

SEQ ID NO: 1909626 - DNA, 15 bp, Homo sapiens
gatggagctttccag

SEQ ID NO: 1909627 - DNA, 15 bp, Homo sapiens
atggagctttccaga

SEQ ID NO: 1909628 - DNA, 15 bp, Homo sapiens
tggagctttccagac

SEQ ID NO: 1909629 - DNA, 15 bp, Homo sapiens
ggagctttccagaca

SEQ ID NO: 1909630 - DNA, 15 bp, Homo sapiens
gagctttccagacaa

SEQ ID NO: 1909631 - DNA, 15 bp, Homo sapiens
agctttccagacaat

SEQ ID NO: 1909632 - DNA, 15 bp, Homo sapiens
gctttccagacaatc

SEQ ID NO: 1909633 - DNA, 15 bp, Homo sapiens
ctttccagacaatct

SEQ ID NO: 1909634 - DNA, 15 bp, Homo sapiens
tttccagacaatctt

SEQ ID NO: 1909635 - DNA, 15 bp, Homo sapiens
ttccagacaatcttg

SEQ ID NO: 1909636 - DNA, 15 bp, Homo sapiens
tccagacaatcttgg

SEQ ID NO: 1909637 - DNA, 15 bp, Homo sapiens
ccagacaatcttggc

SEQ ID NO: 1909638 - DNA, 15 bp, Homo sapiens
cagacaatcttggca

SEQ ID NO: 1909639 - DNA, 15 bp, Homo sapiens
agacaatcttggcat

SEQ ID NO: 1909640 - DNA, 15 bp, Homo sapiens
gacaatcttggcatg

SEQ ID NO: 1909641 - DNA, 15 bp, Homo sapiens
acaatcttggcatga

SEQ ID NO: 1909642 - DNA, 15 bp, Homo sapiens
caatcttggcatgag

SEQ ID NO: 1909643 - DNA, 15 bp, Homo sapiens
aatcttggcatgagg

SEQ ID NO: 1909644 - DNA, 15 bp, Homo sapiens
atcttggcatgagga

SEQ ID NO: 1909645 - DNA, 15 bp, Homo sapiens
tcttggcatgaggat

SEQ ID NO: 1909646 - DNA, 15 bp, Homo sapiens
cttggcatgaggatg

SEQ ID NO: 1909647 - DNA, 15 bp, Homo sapiens
ttggcatgaggatga

SEQ ID NO: 1909648 - DNA, 15 bp, Homo sapiens
tggcatgaggatgag

SEQ ID NO: 1909649 - DNA, 15 bp, Homo sapiens
ggcatgaggatgagt

SEQ ID NO: 1909650 - DNA, 15 bp, Homo sapiens
gcatgaggatgagtg

SEQ ID NO: 1909651 - DNA, 15 bp, Homo sapiens
catgaggatgagtga

SEQ ID NO: 1909652 - DNA, 15 bp, Homo sapiens
atgaggatgagtgag

SEQ ID NO: 1909653 - DNA, 15 bp, Homo sapiens
tgaggatgagtgagt

SEQ ID NO: 1909654 - DNA, 15 bp, Homo sapiens
gaggatgagtgagtt

SEQ ID NO: 1909655 - DNA, 15 bp, Homo sapiens
aggatgagtgagttt

SEQ ID NO: 1909656 - DNA, 15 bp, Homo sapiens
ggatgagtgagtttc

SEQ ID NO: 1909657 - DNA, 15 bp, Homo sapiens
gatgagtgagtttca

SEQ ID NO: 1909658 - DNA, 15 bp, Homo sapiens
atgagtgagtttcaa

SEQ ID NO: 1909659 - DNA, 15 bp, Homo sapiens
tgagtgagtttcaaa

SEQ ID NO: 1909660 - DNA, 15 bp, Homo sapiens
gagtgagtttcaaat

SEQ ID NO: 1909661 - DNA, 15 bp, Homo sapiens
agtgagtttcaaatc

SEQ ID NO: 1909662 - DNA, 15 bp, Homo sapiens
gtgagtttcaaatca

SEQ ID NO: 1909663 - DNA, 15 bp, Homo sapiens
tgagtttcaaatcag

SEQ ID NO: 1909664 - DNA, 15 bp, Homo sapiens
gagtttcaaatcagt

SEQ ID NO: 1909665 - DNA, 15 bp, Homo sapiens
agtttcaaatcagtc

SEQ ID NO: 1909666 - DNA, 15 bp, Homo sapiens
gtttcaaatcagtcc

SEQ ID NO: 1909667 - DNA, 15 bp, Homo sapiens
tttcaaatcagtcct

SEQ ID NO: 1909668 - DNA, 15 bp, Homo sapiens
ttcaaatcagtcctg

SEQ ID NO: 1909669 - DNA, 15 bp, Homo sapiens
tcaaatcagtcctgc

SEQ ID NO: 1909670 - DNA, 15 bp, Homo sapiens
caaatcagtcctgcc

SEQ ID NO: 1909671 - DNA, 15 bp, Homo sapiens
aaatcagtcctgccg

SEQ ID NO: 1909672 - DNA, 15 bp, Homo sapiens
aatcagtcctgccga

SEQ ID NO: 1909673 - DNA, 15 bp, Homo sapiens
atcagtcctgccgag

SEQ ID NO: 1909674 - DNA, 15 bp, Homo sapiens
tcagtcctgccgagg

SEQ ID NO: 1909675 - DNA, 15 bp, Homo sapiens
cagtcctgccgaggc

SEQ ID NO: 1909676 - DNA, 15 bp, Homo sapiens
agtcctgccgaggca

SEQ ID NO: 1909677 - DNA, 15 bp, Homo sapiens
gtcctgccgaggcag

SEQ ID NO: 1909678 - DNA, 15 bp, Homo sapiens
tcctgccgaggcaga

SEQ ID NO: 1909679 - DNA, 15 bp, Homo sapiens
cctgccgaggcagat

SEQ ID NO: 1909680 - DNA, 15 bp, Homo sapiens
ctgccgaggcagatg

SEQ ID NO: 1909681 - DNA, 15 bp, Homo sapiens
tgccgaggcagatgg

SEQ ID NO: 1909682 - DNA, 15 bp, Homo sapiens
gccgaggcagatggc

SEQ ID NO: 1909683 - DNA, 15 bp, Homo sapiens
ccgaggcagatggct

SEQ ID NO: 1909684 - DNA, 15 bp, Homo sapiens
cgaggcagatggctt

SEQ ID NO: 1909685 - DNA, 15 bp, Homo sapiens
gaggcagatggcttc

SEQ ID NO: 1909686 - DNA, 15 bp, Homo sapiens
aggcagatggcttcc

SEQ ID NO: 1909687 - DNA, 15 bp, Homo sapiens
ggcagatggcttcct

SEQ ID NO: 1909688 - DNA, 15 bp, Homo sapiens
gcagatggcttcctc

SEQ ID NO: 1909689 - DNA, 15 bp, Homo sapiens
cagatggcttcctcc

SEQ ID NO: 1909690 - DNA, 15 bp, Homo sapiens
agatggcttcctcca

SEQ ID NO: 1909691 - DNA, 15 bp, Homo sapiens
gatggcttcctccag

SEQ ID NO: 1909692 - DNA, 15 bp, Homo sapiens
atggcttcctccagc

SEQ ID NO: 1909693 - DNA, 15 bp, Homo sapiens
tggcttcctccagct

SEQ ID NO: 1909694 - DNA, 15 bp, Homo sapiens
ggcttcctccagctc

SEQ ID NO: 1909695 - DNA, 15 bp, Homo sapiens
gcttcctccagctct

SEQ ID NO: 1909696 - DNA, 15 bp, Homo sapiens
cttcctccagctctg

SEQ ID NO: 1909697 - DNA, 15 bp, Homo sapiens
ttcctccagctctgc

SEQ ID NO: 1909698 - DNA, 15 bp, Homo sapiens
tcctccagctctgct

SEQ ID NO: 1909699 - DNA, 15 bp, Homo sapiens
cctccagctctgctt

SEQ ID NO: 1909700 - DNA, 15 bp, Homo sapiens
ctccagctctgctta

SEQ ID NO: 1909701 - DNA, 15 bp, Homo sapiens
tccagctctgcttac

SEQ ID NO: 1909702 - DNA, 15 bp, Homo sapiens
ccagctctgcttact

SEQ ID NO: 1909703 - DNA, 15 bp, Homo sapiens
cagctctgcttactg

SEQ ID NO: 1909704 - DNA, 15 bp, Homo sapiens
agctctgcttactga

SEQ ID NO: 1909705 - DNA, 15 bp, Homo sapiens
gctctgcttactgaa

SEQ ID NO: 1909706 - DNA, 15 bp, Homo sapiens
ctctgcttactgaat

SEQ ID NO: 1909707 - DNA, 15 bp, Homo sapiens
tctgcttactgaatg

SEQ ID NO: 1909708 - DNA, 15 bp, Homo sapiens
ctgcttactgaatgc

SEQ ID NO: 1909709 - DNA, 15 bp, Homo sapiens
tgcttactgaatgcg

SEQ ID NO: 1909710 - DNA, 15 bp, Homo sapiens
gcttactgaatgcga

SEQ ID NO: 1909711 - DNA, 15 bp, Homo sapiens
cttactgaatgcgaa

SEQ ID NO: 1909712 - DNA, 15 bp, Homo sapiens
ttactgaatgcgaag

SEQ ID NO: 1909713 - DNA, 15 bp, Homo sapiens
tactgaatgcgaagt

SEQ ID NO: 1909714 - DNA, 15 bp, Homo sapiens
actgaatgcgaagtc

SEQ ID NO: 1909715 - DNA, 15 bp, Homo sapiens
ctgaatgcgaagtca

SEQ ID NO: 1909716 - DNA, 15 bp, Homo sapiens
tgaatgcgaagtcac

SEQ ID NO: 1909717 - DNA, 15 bp, Homo sapiens
gaatgcgaagtcaca

SEQ ID NO: 1909718 - DNA, 15 bp, Homo sapiens
aatgcgaagtcacag

SEQ ID NO: 1909719 - DNA, 15 bp, Homo sapiens
atgcgaagtcacagt

SEQ ID NO: 1909720 - DNA, 15 bp, Homo sapiens
tgcgaagtcacagtc

SEQ ID NO: 1909721 - DNA, 15 bp, Homo sapiens
gcgaagtcacagtca

SEQ ID NO: 1909722 - DNA, 15 bp, Homo sapiens
cgaagtcacagtcag

SEQ ID NO: 1909723 - DNA, 15 bp, Homo sapiens
gaagtcacagtcagt

SEQ ID NO: 1909724 - DNA, 15 bp, Homo sapiens
aagtcacagtcagta

SEQ ID NO: 1909725 - DNA, 15 bp, Homo sapiens
agtcacagtcagtaa

SEQ ID NO: 1909726 - DNA, 15 bp, Homo sapiens
gtcacagtcagtaag

SEQ ID NO: 1909727 - DNA, 15 bp, Homo sapiens
tcacagtcagtaaga

SEQ ID NO: 1909728 - DNA, 15 bp, Homo sapiens
cacagtcagtaagaa

SEQ ID NO: 1909729 - DNA, 15 bp, Homo sapiens
acagtcagtaagaaa

SEQ ID NO: 1909730 - DNA, 15 bp, Homo sapiens
cagtcagtaagaaaa

SEQ ID NO: 1909731 - DNA, 15 bp, Homo sapiens
agtcagtaagaaaac

SEQ ID NO: 1909732 - DNA, 15 bp, Homo sapiens
gtcagtaagaaaact

SEQ ID NO: 1909733 - DNA, 15 bp, Homo sapiens
tcagtaagaaaactg

SEQ ID NO: 1909734 - DNA, 15 bp, Homo sapiens
cagtaagaaaactgg

SEQ ID NO: 1909735 - DNA, 15 bp, Homo sapiens
agtaagaaaactggt

SEQ ID NO: 1909736 - DNA, 15 bp, Homo sapiens
gtaagaaaactggtt

SEQ ID NO: 1909737 - DNA, 15 bp, Homo sapiens
taagaaaactggttt

SEQ ID NO: 1909738 - DNA, 15 bp, Homo sapiens
aagaaaactggtttt

SEQ ID NO: 1909739 - DNA, 15 bp, Homo sapiens
agaaaactggttttc

SEQ ID NO: 1909740 - DNA, 15 bp, Homo sapiens
gaaaactggttttct

SEQ ID NO: 1909741 - DNA, 15 bp, Homo sapiens
aaaactggttttctt

SEQ ID NO: 1909742 - DNA, 15 bp, Homo sapiens
aaactggttttcttc

SEQ ID NO: 1909743 - DNA, 15 bp, Homo sapiens
aactggttttcttct

SEQ ID NO: 1909744 - DNA, 15 bp, Homo sapiens
actggttttcttctt

SEQ ID NO: 1909745 - DNA, 15 bp, Homo sapiens
ctggttttcttcttc

SEQ ID NO: 1909746 - DNA, 15 bp, Homo sapiens
tggttttcttcttcc

SEQ ID NO: 1909747 - DNA, 15 bp, Homo sapiens
ggttttcttcttccc

SEQ ID NO: 1909748 - DNA, 15 bp, Homo sapiens
gttttcttcttccca

SEQ ID NO: 1909749 - DNA, 15 bp, Homo sapiens
ttttcttcttcccag

SEQ ID NO: 1909750 - DNA, 15 bp, Homo sapiens
tttcttcttcccagg

SEQ ID NO: 1909751 - DNA, 15 bp, Homo sapiens
ttcttcttcccaggc

SEQ ID NO: 1909752 - DNA, 15 bp, Homo sapiens
tcttcttcccaggcg

SEQ ID NO: 1909753 - DNA, 15 bp, Homo sapiens
cttcttcccaggcgc

SEQ ID NO: 1909754 - DNA, 15 bp, Homo sapiens
ttcttcccaggcgct

SEQ ID NO: 1909755 - DNA, 15 bp, Homo sapiens
tcttcccaggcgctg

SEQ ID NO: 1909756 - DNA, 15 bp, Homo sapiens
cttcccaggcgctgc

SEQ ID NO: 1909757 - DNA, 15 bp, Homo sapiens
ttcccaggcgctgcc

SEQ ID NO: 1909758 - DNA, 15 bp, Homo sapiens
tcccaggcgctgccc

SEQ ID NO: 1909759 - DNA, 15 bp, Homo sapiens
cccaggcgctgcccc

SEQ ID NO: 1909760 - DNA, 15 bp, Homo sapiens
ccaggcgctgcccca

SEQ ID NO: 1909761 - DNA, 15 bp, Homo sapiens
caggcgctgccccat

SEQ ID NO: 1909762 - DNA, 15 bp, Homo sapiens
aggcgctgccccata

SEQ ID NO: 1909763 - DNA, 15 bp, Homo sapiens
ggcgctgccccatac

SEQ ID NO: 1909764 - DNA, 15 bp, Homo sapiens
gcgctgccccatacc

SEQ ID NO: 1909765 - DNA, 15 bp, Homo sapiens
cgctgccccatacct

SEQ ID NO: 1909766 - DNA, 15 bp, Homo sapiens
gctgccccatacctg

SEQ ID NO: 1909767 - DNA, 15 bp, Homo sapiens
ctgccccatacctga

SEQ ID NO: 1909768 - DNA, 15 bp, Homo sapiens
tgccccatacctgaa

SEQ ID NO: 1909769 - DNA, 15 bp, Homo sapiens
gccccatacctgaag

SEQ ID NO: 1909770 - DNA, 15 bp, Homo sapiens
ccccatacctgaaga

SEQ ID NO: 1909771 - DNA, 15 bp, Homo sapiens
cccatacctgaagac

SEQ ID NO: 1909772 - DNA, 15 bp, Homo sapiens
ccatacctgaagacc

SEQ ID NO: 1909773 - DNA, 15 bp, Homo sapiens
catacctgaagacca

SEQ ID NO: 1909774 - DNA, 15 bp, Homo sapiens
atacctgaagaccaa

SEQ ID NO: 1909775 - DNA, 15 bp, Homo sapiens
tacctgaagaccaag

SEQ ID NO: 1909776 - DNA, 15 bp, Homo sapiens
acctgaagaccaagt

SEQ ID NO: 1909777 - DNA, 15 bp, Homo sapiens
cctgaagaccaagtt

SEQ ID NO: 1909778 - DNA, 15 bp, Homo sapiens
ctgaagaccaagttt

SEQ ID NO: 1909779 - DNA, 15 bp, Homo sapiens
tgaagaccaagttta

SEQ ID NO: 1909780 - DNA, 15 bp, Homo sapiens
gaagaccaagtttat

SEQ ID NO: 1909781 - DNA, 15 bp, Homo sapiens
aagaccaagtttatc

SEQ ID NO: 1909782 - DNA, 15 bp, Homo sapiens
agaccaagtttatct

SEQ ID NO: 1909783 - DNA, 15 bp, Homo sapiens
gaccaagtttatctg

SEQ ID NO: 1909784 - DNA, 15 bp, Homo sapiens
accaagtttatctgt

SEQ ID NO: 1909785 - DNA, 15 bp, Homo sapiens
ccaagtttatctgtg

SEQ ID NO: 1909786 - DNA, 15 bp, Homo sapiens
caagtttatctgtgt

SEQ ID NO: 1909787 - DNA, 15 bp, Homo sapiens
aagtttatctgtgtg

SEQ ID NO: 1909788 - DNA, 15 bp, Homo sapiens
agtttatctgtgtga

SEQ ID NO: 1909789 - DNA, 15 bp, Homo sapiens
gtttatctgtgtgac

SEQ ID NO: 1909790 - DNA, 15 bp, Homo sapiens
tttatctgtgtgaca

SEQ ID NO: 1909791 - DNA, 15 bp, Homo sapiens
ttatctgtgtgacac

SEQ ID NO: 1909792 - DNA, 15 bp, Homo sapiens
tatctgtgtgacacc

SEQ ID NO: 1909793 - DNA, 15 bp, Homo sapiens
atctgtgtgacaccg

SEQ ID NO: 1909794 - DNA, 15 bp, Homo sapiens
tctgtgtgacaccgt

SEQ ID NO: 1909795 - DNA, 15 bp, Homo sapiens
ctgtgtgacaccgta

SEQ ID NO: 1909796 - DNA, 15 bp, Homo sapiens
tgtgtgacaccgtaa

SEQ ID NO: 1909797 - DNA, 15 bp, Homo sapiens
gtgtgacaccgtaag

SEQ ID NO: 1909798 - DNA, 15 bp, Homo sapiens
tgtgacaccgtaagt

SEQ ID NO: 1909799 - DNA, 15 bp, Homo sapiens
gtgacaccgtaagtg

SEQ ID NO: 1909800 - DNA, 15 bp, Homo sapiens
tgacaccgtaagtgg

SEQ ID NO: 1909801 - DNA, 15 bp, Homo sapiens
gacaccgtaagtggc

SEQ ID NO: 1909802 - DNA, 15 bp, Homo sapiens
acaccgtaagtggct

SEQ ID NO: 1909803 - DNA, 15 bp, Homo sapiens
caccgtaagtggctt

SEQ ID NO: 1909804 - DNA, 15 bp, Homo sapiens
accgtaagtggcttc

SEQ ID NO: 1909805 - DNA, 15 bp, Homo sapiens
ccgtaagtggcttcc

SEQ ID NO: 1909806 - DNA, 15 bp, Homo sapiens
cgtaagtggcttcct

SEQ ID NO: 1909807 - DNA, 15 bp, Homo sapiens
gtaagtggcttcctt

SEQ ID NO: 1909808 - DNA, 15 bp, Homo sapiens
taagtggcttccttt

SEQ ID NO: 1909809 - DNA, 15 bp, Homo sapiens
aagtggcttcctttc

SEQ ID NO: 1909810 - DNA, 15 bp, Homo sapiens
agtggcttcctttcc

SEQ ID NO: 1909811 - DNA, 15 bp, Homo sapiens
gtggcttcctttccc

SEQ ID NO: 1909812 - DNA, 15 bp, Homo sapiens
tggcttcctttcccc

SEQ ID NO: 1909813 - DNA, 15 bp, Homo sapiens
ggcttcctttccccg

SEQ ID NO: 1909814 - DNA, 15 bp, Homo sapiens
gcttcctttccccgt

SEQ ID NO: 1909815 - DNA, 15 bp, Homo sapiens
cttcctttccccgtt

SEQ ID NO: 1909816 - DNA, 15 bp, Homo sapiens
ttcctttccccgttt

SEQ ID NO: 1909817 - DNA, 15 bp, Homo sapiens
tcctttccccgtttt

SEQ ID NO: 1909818 - DNA, 15 bp, Homo sapiens
cctttccccgttttg

SEQ ID NO: 1909819 - DNA, 15 bp, Homo sapiens
ctttccccgttttgc

SEQ ID NO: 1909820 - DNA, 15 bp, Homo sapiens
tttccccgttttgcc

SEQ ID NO: 1909821 - DNA, 15 bp, Homo sapiens
ttccccgttttgcct

SEQ ID NO: 1909822 - DNA, 15 bp, Homo sapiens
tccccgttttgcctt

SEQ ID NO: 1909823 - DNA, 15 bp, Homo sapiens
ccccgttttgccttc

SEQ ID NO: 1909824 - DNA, 15 bp, Homo sapiens
cccgttttgccttca

SEQ ID NO: 1909825 - DNA, 15 bp, Homo sapiens
ccgttttgccttcat

SEQ ID NO: 1909826 - DNA, 15 bp, Homo sapiens
cgttttgccttcatt

SEQ ID NO: 1909827 - DNA, 15 bp, Homo sapiens
gttttgccttcattt

SEQ ID NO: 1909828 - DNA, 15 bp, Homo sapiens
ttttgccttcatttc

SEQ ID NO: 1909829 - DNA, 15 bp, Homo sapiens
tttgccttcatttct

SEQ ID NO: 1909830 - DNA, 15 bp, Homo sapiens
ttgccttcatttcta

SEQ ID NO: 1909831 - DNA, 15 bp, Homo sapiens
tgccttcatttctaa

SEQ ID NO: 1909832 - DNA, 15 bp, Homo sapiens
gccttcatttctaat

SEQ ID NO: 1909833 - DNA, 15 bp, Homo sapiens
ccttcatttctaata

SEQ ID NO: 1909834 - DNA, 15 bp, Homo sapiens
cttcatttctaatat

SEQ ID NO: 1909835 - DNA, 15 bp, Homo sapiens
ttcatttctaatatc

SEQ ID NO: 1909836 - DNA, 15 bp, Homo sapiens
tcatttctaatatcc

SEQ ID NO: 1909837 - DNA, 15 bp, Homo sapiens
catttctaatatcct

SEQ ID NO: 1909838 - DNA, 15 bp, Homo sapiens
atttctaatatcctc

SEQ ID NO: 1909839 - DNA, 15 bp, Homo sapiens
tttctaatatcctca

SEQ ID NO: 1909840 - DNA, 15 bp, Homo sapiens
ttctaatatcctcag

SEQ ID NO: 1909841 - DNA, 15 bp, Homo sapiens
tctaatatcctcagt

SEQ ID NO: 1909842 - DNA, 15 bp, Homo sapiens
ctaatatcctcagtt

SEQ ID NO: 1909843 - DNA, 15 bp, Homo sapiens
taatatcctcagtta

SEQ ID NO: 1909844 - DNA, 15 bp, Homo sapiens
aatatcctcagttat

SEQ ID NO: 1909845 - DNA, 15 bp, Homo sapiens
atatcctcagttatc

SEQ ID NO: 1909846 - DNA, 15 bp, Homo sapiens
tatcctcagttatcc

SEQ ID NO: 1909847 - DNA, 15 bp, Homo sapiens
atcctcagttatccc

SEQ ID NO: 1909848 - DNA, 15 bp, Homo sapiens
tcctcagttatccct

SEQ ID NO: 1909849 - DNA, 15 bp, Homo sapiens
cctcagttatccctg

SEQ ID NO: 1909850 - DNA, 15 bp, Homo sapiens
ctcagttatccctgg

SEQ ID NO: 1909851 - DNA, 15 bp, Homo sapiens
tcagttatccctggg

SEQ ID NO: 1909852 - DNA, 15 bp, Homo sapiens
cagttatccctggga

SEQ ID NO: 1909853 - DNA, 15 bp, Homo sapiens
agttatccctgggaa

SEQ ID NO: 1909854 - DNA, 15 bp, Homo sapiens
gttatccctgggaat

SEQ ID NO: 1909855 - DNA, 15 bp, Homo sapiens
ttatccctgggaatg

SEQ ID NO: 1909856 - DNA, 15 bp, Homo sapiens
atccctgggaatggg

SEQ ID NO: 1909857 - DNA, 15 bp, Homo sapiens
tccctgggaatggga

SEQ ID NO: 1909858 - DNA, 15 bp, Homo sapiens
ccctgggaatgggac

SEQ ID NO: 1909859 - DNA, 15 bp, Homo sapiens
cctgggaatgggaca

SEQ ID NO: 1909860 - DNA, 15 bp, Homo sapiens
ctgggaatgggacac

SEQ ID NO: 1909861 - DNA, 15 bp, Homo sapiens
tgggaatgggacact

SEQ ID NO: 1909862 - DNA, 15 bp, Homo sapiens
gggaatgggacactg

SEQ ID NO: 1909863 - DNA, 15 bp, Homo sapiens
ggaatgggacactgg

SEQ ID NO: 1909864 - DNA, 15 bp, Homo sapiens
gaatgggacactggg

SEQ ID NO: 1909865 - DNA, 15 bp, Homo sapiens
aatgggacactgggt

SEQ ID NO: 1909866 - DNA, 15 bp, Homo sapiens
atgggacactgggtg

SEQ ID NO: 1909867 - DNA, 15 bp, Homo sapiens
tgggacactgggtga

SEQ ID NO: 1909868 - DNA, 15 bp, Homo sapiens
gggacactgggtgag

SEQ ID NO: 1909869 - DNA, 15 bp, Homo sapiens
ggacactgggtgaga

SEQ ID NO: 1909870 - DNA, 15 bp, Homo sapiens
gacactgggtgagag

SEQ ID NO: 1909871 - DNA, 15 bp, Homo sapiens
acactgggtgagagt

SEQ ID NO: 1909872 - DNA, 15 bp, Homo sapiens
cactgggtgagagtt

SEQ ID NO: 1909873 - DNA, 15 bp, Homo sapiens
actgggtgagagtta

SEQ ID NO: 1909874 - DNA, 15 bp, Homo sapiens
ctgggtgagagttaa

SEQ ID NO: 1909875 - DNA, 15 bp, Homo sapiens
tgggtgagagttaat

SEQ ID NO: 1909876 - DNA, 15 bp, Homo sapiens
gggtgagagttaatc

SEQ ID NO: 1909877 - DNA, 15 bp, Homo sapiens
ggtgagagttaatct

SEQ ID NO: 1909878 - DNA, 15 bp, Homo sapiens
gtgagagttaatctg

SEQ ID NO: 1909879 - DNA, 15 bp, Homo sapiens
tgagagttaatctgc

SEQ ID NO: 1909880 - DNA, 15 bp, Homo sapiens
gagagttaatctgcc

SEQ ID NO: 1909881 - DNA, 15 bp, Homo sapiens
agagttaatctgcca

SEQ ID NO: 1909882 - DNA, 15 bp, Homo sapiens
gagttaatctgccaa

SEQ ID NO: 1909883 - DNA, 15 bp, Homo sapiens
agttaatctgccaaa

SEQ ID NO: 1909884 - DNA, 15 bp, Homo sapiens
gttaatctgccaaag

SEQ ID NO: 1909885 - DNA, 15 bp, Homo sapiens
ttaatctgccaaagg

SEQ ID NO: 1909886 - DNA, 15 bp, Homo sapiens
taatctgccaaaggt

SEQ ID NO: 1909887 - DNA, 15 bp, Homo sapiens
aatctgccaaaggtt

SEQ ID NO: 1909888 - DNA, 15 bp, Homo sapiens
atctgccaaaggttg

SEQ ID NO: 1909889 - DNA, 15 bp, Homo sapiens
tctgccaaaggttgg

SEQ ID NO: 1909890 - DNA, 15 bp, Homo sapiens
ctgccaaaggttgga

SEQ ID NO: 1909891 - DNA, 15 bp, Homo sapiens
tgccaaaggttggaa

SEQ ID NO: 1909892 - DNA, 15 bp, Homo sapiens
gccaaaggttggaag

SEQ ID NO: 1909893 - DNA, 15 bp, Homo sapiens
ccaaaggttggaagc

SEQ ID NO: 1909894 - DNA, 15 bp, Homo sapiens
caaaggttggaagcc

SEQ ID NO: 1909895 - DNA, 15 bp, Homo sapiens
aaaggttggaagccc

SEQ ID NO: 1909896 - DNA, 15 bp, Homo sapiens
aaggttggaagcccc

SEQ ID NO: 1909897 - DNA, 15 bp, Homo sapiens
aggttggaagcccct

SEQ ID NO: 1909898 - DNA, 15 bp, Homo sapiens
ggttggaagcccctg

SEQ ID NO: 1909899 - DNA, 15 bp, Homo sapiens
gttggaagcccctgg

SEQ ID NO: 1909900 - DNA, 15 bp, Homo sapiens
ttggaagcccctggg

SEQ ID NO: 1909901 - DNA, 15 bp, Homo sapiens
tggaagcccctgggc

SEQ ID NO: 1909902 - DNA, 15 bp, Homo sapiens
ggaagcccctgggct

SEQ ID NO: 1909903 - DNA, 15 bp, Homo sapiens
gaagcccctgggcta

SEQ ID NO: 1909904 - DNA, 15 bp, Homo sapiens
aagcccctgggctat

SEQ ID NO: 1909905 - DNA, 15 bp, Homo sapiens
agcccctgggctatg

SEQ ID NO: 1909906 - DNA, 15 bp, Homo sapiens
gcccctgggctatgt

SEQ ID NO: 1909907 - DNA, 15 bp, Homo sapiens
cccctgggctatgtt

SEQ ID NO: 1909908 - DNA, 15 bp, Homo sapiens
ccctgggctatgttt

SEQ ID NO: 1909909 - DNA, 15 bp, Homo sapiens
cctgggctatgttta

SEQ ID NO: 1909910 - DNA, 15 bp, Homo sapiens
ctgggctatgtttag

SEQ ID NO: 1909911 - DNA, 15 bp, Homo sapiens
tgggctatgtttagt

SEQ ID NO: 1909912 - DNA, 15 bp, Homo sapiens
gggctatgtttagta

SEQ ID NO: 1909913 - DNA, 15 bp, Homo sapiens
ggctatgtttagtac

SEQ ID NO: 1909914 - DNA, 15 bp, Homo sapiens
gctatgtttagtact

SEQ ID NO: 1909915 - DNA, 15 bp, Homo sapiens
ctatgtttagtactc

SEQ ID NO: 1909916 - DNA, 15 bp, Homo sapiens
tatgtttagtactca

SEQ ID NO: 1909917 - DNA, 15 bp, Homo sapiens
atgtttagtactcaa

SEQ ID NO: 1909918 - DNA, 15 bp, Homo sapiens
tgtttagtactcaaa

SEQ ID NO: 1909919 - DNA, 15 bp, Homo sapiens
gtttagtactcaaag

SEQ ID NO: 1909920 - DNA, 15 bp, Homo sapiens
tttagtactcaaagt

SEQ ID NO: 1909921 - DNA, 15 bp, Homo sapiens
ttagtactcaaagtg

SEQ ID NO: 1909922 - DNA, 15 bp, Homo sapiens
tagtactcaaagtga

SEQ ID NO: 1909923 - DNA, 15 bp, Homo sapiens
agtactcaaagtgac

SEQ ID NO: 1909924 - DNA, 15 bp, Homo sapiens
gtactcaaagtgacc

SEQ ID NO: 1909925 - DNA, 15 bp, Homo sapiens
tactcaaagtgacct

SEQ ID NO: 1909926 - DNA, 15 bp, Homo sapiens
actcaaagtgacctt

SEQ ID NO: 1909927 - DNA, 15 bp, Homo sapiens
ctcaaagtgaccttg

SEQ ID NO: 1909928 - DNA, 15 bp, Homo sapiens
tcaaagtgaccttgt

SEQ ID NO: 1909929 - DNA, 15 bp, Homo sapiens
caaagtgaccttgtg

SEQ ID NO: 1909930 - DNA, 15 bp, Homo sapiens
aaagtgaccttgtgt

SEQ ID NO: 1909931 - DNA, 15 bp, Homo sapiens
aagtgaccttgtgtg

SEQ ID NO: 1909932 - DNA, 15 bp, Homo sapiens
gtgaccttgtgtgtt

SEQ ID NO: 1909933 - DNA, 15 bp, Homo sapiens
tgaccttgtgtgttt

SEQ ID NO: 1909934 - DNA, 15 bp, Homo sapiens
gaccttgtgtgttta

SEQ ID NO: 1909935 - DNA, 15 bp, Homo sapiens
accttgtgtgtttaa

SEQ ID NO: 1909936 - DNA, 15 bp, Homo sapiens
ccttgtgtgtttaaa

SEQ ID NO: 1909937 - DNA, 15 bp, Homo sapiens
cttgtgtgtttaaaa

SEQ ID NO: 1909938 - DNA, 15 bp, Homo sapiens
ttgtgtgtttaaaaa

SEQ ID NO: 1909939 - DNA, 15 bp, Homo sapiens
tgtgtgtttaaaaag

SEQ ID NO: 1909940 - DNA, 15 bp, Homo sapiens
gtgtgtttaaaaagc

SEQ ID NO: 1909941 - DNA, 15 bp, Homo sapiens
tgtgtttaaaaagct

SEQ ID NO: 1909942 - DNA, 15 bp, Homo sapiens
gtgtttaaaaagctt

SEQ ID NO: 1909943 - DNA, 15 bp, Homo sapiens
tgtttaaaaagcttg

SEQ ID NO: 1909944 - DNA, 15 bp, Homo sapiens
gtttaaaaagcttga

SEQ ID NO: 1909945 - DNA, 15 bp, Homo sapiens
tttaaaaagcttgag

SEQ ID NO: 1909946 - DNA, 15 bp, Homo sapiens
ttaaaaagcttgagc

SEQ ID NO: 1909947 - DNA, 15 bp, Homo sapiens
taaaaagcttgagct

SEQ ID NO: 1909948 - DNA, 15 bp, Homo sapiens
aaaaagcttgagctt

SEQ ID NO: 1909949 - DNA, 15 bp, Homo sapiens
aaaagcttgagcttt

SEQ ID NO: 1909950 - DNA, 15 bp, Homo sapiens
aaagcttgagctttt

SEQ ID NO: 1909951 - DNA, 15 bp, Homo sapiens
aagcttgagctttta

SEQ ID NO: 1909952 - DNA, 15 bp, Homo sapiens
agcttgagcttttat

SEQ ID NO: 1909953 - DNA, 15 bp, Homo sapiens
gcttgagcttttatt

SEQ ID NO: 1909954 - DNA, 15 bp, Homo sapiens
cttgagcttttattt

SEQ ID NO: 1909955 - DNA, 15 bp, Homo sapiens
ttgagcttttatttt

SEQ ID NO: 1909956 - DNA, 15 bp, Homo sapiens
tgagcttttattttt

SEQ ID NO: 1909957 - DNA, 15 bp, Homo sapiens
gagcttttatttttc

SEQ ID NO: 1909958 - DNA, 15 bp, Homo sapiens
agcttttatttttct

SEQ ID NO: 1909959 - DNA, 15 bp, Homo sapiens
gcttttatttttctg

SEQ ID NO: 1909960 - DNA, 15 bp, Homo sapiens
cttttatttttctgt

SEQ ID NO: 1909961 - DNA, 15 bp, Homo sapiens
ttttatttttctgtt

SEQ ID NO: 1909962 - DNA, 15 bp, Homo sapiens
tttatttttctgttg

SEQ ID NO: 1909963 - DNA, 15 bp, Homo sapiens
ttatttttctgttgg

SEQ ID NO: 1909964 - DNA, 15 bp, Homo sapiens
tatttttctgttgga

SEQ ID NO: 1909965 - DNA, 15 bp, Homo sapiens
atttttctgttggag

SEQ ID NO: 1909966 - DNA, 15 bp, Homo sapiens
tttttctgttggaga

SEQ ID NO: 1909967 - DNA, 15 bp, Homo sapiens
ttttctgttggagac

SEQ ID NO: 1909968 - DNA, 15 bp, Homo sapiens
tttctgttggagacc

SEQ ID NO: 1909969 - DNA, 15 bp, Homo sapiens
ttctgttggagacca

SEQ ID NO: 1909970 - DNA, 15 bp, Homo sapiens
tctgttggagaccag

SEQ ID NO: 1909971 - DNA, 15 bp, Homo sapiens
ctgttggagaccaga

SEQ ID NO: 1909972 - DNA, 15 bp, Homo sapiens
tgttggagaccagag

SEQ ID NO: 1909973 - DNA, 15 bp, Homo sapiens
gttggagaccagagt

SEQ ID NO: 1909974 - DNA, 15 bp, Homo sapiens
ttggagaccagagtt

SEQ ID NO: 1909975 - DNA, 15 bp, Homo sapiens
tggagaccagagttt

SEQ ID NO: 1909976 - DNA, 15 bp, Homo sapiens
ggagaccagagtttg

SEQ ID NO: 1909977 - DNA, 15 bp, Homo sapiens
gagaccagagtttga

SEQ ID NO: 1909978 - DNA, 15 bp, Homo sapiens
agaccagagtttgat

SEQ ID NO: 1909979 - DNA, 15 bp, Homo sapiens
gaccagagtttgatg

SEQ ID NO: 1909980 - DNA, 15 bp, Homo sapiens
accagagtttgatgg

SEQ ID NO: 1909981 - DNA, 15 bp, Homo sapiens
ccagagtttgatggc

SEQ ID NO: 1909982 - DNA, 15 bp, Homo sapiens
cagagtttgatggct

SEQ ID NO: 1909983 - DNA, 15 bp, Homo sapiens
agagtttgatggctt

SEQ ID NO: 1909984 - DNA, 15 bp, Homo sapiens
gagtttgatggcttg

SEQ ID NO: 1909985 - DNA, 15 bp, Homo sapiens
agtttgatggcttgt

SEQ ID NO: 1909986 - DNA, 15 bp, Homo sapiens
gtttgatggcttgtg

SEQ ID NO: 1909987 - DNA, 15 bp, Homo sapiens
tttgatggcttgtgt

SEQ ID NO: 1909988 - DNA, 15 bp, Homo sapiens
ttgatggcttgtgtg

SEQ ID NO: 1909989 - DNA, 15 bp, Homo sapiens
tgatggcttgtgtgt

SEQ ID NO: 1909990 - DNA, 15 bp, Homo sapiens
gatggcttgtgtgtg

SEQ ID NO: 1909991 - DNA, 15 bp, Homo sapiens
atggcttgtgtgtgt

SEQ ID NO: 1909992 - DNA, 15 bp, Homo sapiens
tggcttgtgtgtgtg

SEQ ID NO: 1909993 - DNA, 15 bp, Homo sapiens
ggcttgtgtgtgtgt

SEQ ID NO: 1909994 - DNA, 15 bp, Homo sapiens
ttgtgtgtgtgtgtt

SEQ ID NO: 1909995 - DNA, 15 bp, Homo sapiens
tgtgtgtgtgttttg

SEQ ID NO: 1909996 - DNA, 15 bp, Homo sapiens
gtgtgtgtgttttgt

SEQ ID NO: 1909997 - DNA, 15 bp, Homo sapiens
tgtgtgtgttttgtt

SEQ ID NO: 1909998 - DNA, 15 bp, Homo sapiens
gtgtgtgttttgttc

SEQ ID NO: 1909999 - DNA, 15 bp, Homo sapiens
tgtgtgttttgttct

SEQ ID NO: 1910000 - DNA, 15 bp, Homo sapiens
gtgtgttttgttctt

SEQ ID NO: 1910001 - DNA, 15 bp, Homo sapiens
tgtgttttgttcttt

SEQ ID NO: 1910002 - DNA, 15 bp, Homo sapiens
gtgttttgttctttt

SEQ ID NO: 1910003 - DNA, 15 bp, Homo sapiens
tgttttgttcttttt

SEQ ID NO: 1910004 - DNA, 15 bp, Homo sapiens
gttttgttctttttt

SEQ ID NO: 1910005 - DNA, 15 bp, Homo sapiens
ttttgttcttttttt

SEQ ID NO: 1910006 - DNA, 15 bp, Homo sapiens
tttgttctttttttt

SEQ ID NO: 1910007 - DNA, 15 bp, Homo sapiens
ttgttcttttttttt

SEQ ID NO: 1910008 - DNA, 15 bp, Homo sapiens
cttttttttttttcc

SEQ ID NO: 1910009 - DNA, 15 bp, Homo sapiens
tttttttttttccat

SEQ ID NO: 1910010 - DNA, 15 bp, Homo sapiens
ttttttttttccatt

SEQ ID NO: 1910011 - DNA, 15 bp, Homo sapiens
tttttttttccattg

SEQ ID NO: 1910012 - DNA, 15 bp, Homo sapiens
ttttttttccattgt

SEQ ID NO: 1910013 - DNA, 15 bp, Homo sapiens
tttttttccattgtg

SEQ ID NO: 1910014 - DNA, 15 bp, Homo sapiens
ttttttccattgtgt

SEQ ID NO: 1910015 - DNA, 15 bp, Homo sapiens
tttttccattgtgtc

SEQ ID NO: 1910016 - DNA, 15 bp, Homo sapiens
ttttccattgtgtct

SEQ ID NO: 1910017 - DNA, 15 bp, Homo sapiens
tttccattgtgtctt

SEQ ID NO: 1910018 - DNA, 15 bp, Homo sapiens
ttccattgtgtcttg

SEQ ID NO: 1910019 - DNA, 15 bp, Homo sapiens
tccattgtgtcttgt

SEQ ID NO: 1910020 - DNA, 15 bp, Homo sapiens
ccattgtgtcttgtc

SEQ ID NO: 1910021 - DNA, 15 bp, Homo sapiens
cattgtgtcttgtca

SEQ ID NO: 1910022 - DNA, 15 bp, Homo sapiens
attgtgtcttgtcaa

SEQ ID NO: 1910023 - DNA, 15 bp, Homo sapiens
ttgtgtcttgtcaac

SEQ ID NO: 1910024 - DNA, 15 bp, Homo sapiens
tgtgtcttgtcaacc

SEQ ID NO: 1910025 - DNA, 15 bp, Homo sapiens
gtgtcttgtcaaccc

SEQ ID NO: 1910026 - DNA, 15 bp, Homo sapiens
tgtcttgtcaacccc

SEQ ID NO: 1910027 - DNA, 15 bp, Homo sapiens
gtcttgtcaaccccc

SEQ ID NO: 1910028 - DNA, 15 bp, Homo sapiens
tcttgtcaacccccc

SEQ ID NO: 1910029 - DNA, 15 bp, Homo sapiens
cttgtcaaccccccg

SEQ ID NO: 1910030 - DNA, 15 bp, Homo sapiens
ttgtcaaccccccgt

SEQ ID NO: 1910031 - DNA, 15 bp, Homo sapiens
tgtcaaccccccgtt

SEQ ID NO: 1910032 - DNA, 15 bp, Homo sapiens
gtcaaccccccgttt

SEQ ID NO: 1910033 - DNA, 15 bp, Homo sapiens
tcaaccccccgtttc

SEQ ID NO: 1910034 - DNA, 15 bp, Homo sapiens
caaccccccgtttcc

SEQ ID NO: 1910035 - DNA, 15 bp, Homo sapiens
aaccccccgtttccc

SEQ ID NO: 1910036 - DNA, 15 bp, Homo sapiens
accccccgtttcccc

SEQ ID NO: 1910037 - DNA, 15 bp, Homo sapiens
ccccccgtttcccct

SEQ ID NO: 1910038 - DNA, 15 bp, Homo sapiens
cccccgtttcccctc

SEQ ID NO: 1910039 - DNA, 15 bp, Homo sapiens
ccccgtttcccctcc

SEQ ID NO: 1910040 - DNA, 15 bp, Homo sapiens
cccgtttcccctcct

SEQ ID NO: 1910041 - DNA, 15 bp, Homo sapiens
ccgtttcccctcctg

SEQ ID NO: 1910042 - DNA, 15 bp, Homo sapiens
cgtttcccctcctgc

SEQ ID NO: 1910043 - DNA, 15 bp, Homo sapiens
gtttcccctcctgct

SEQ ID NO: 1910044 - DNA, 15 bp, Homo sapiens
tttcccctcctgctg

SEQ ID NO: 1910045 - DNA, 15 bp, Homo sapiens
ttcccctcctgctgc

SEQ ID NO: 1910046 - DNA, 15 bp, Homo sapiens
tcccctcctgctgcc

SEQ ID NO: 1910047 - DNA, 15 bp, Homo sapiens
cccctcctgctgccc

SEQ ID NO: 1910048 - DNA, 15 bp, Homo sapiens
ccctcctgctgcccc

SEQ ID NO: 1910049 - DNA, 15 bp, Homo sapiens
cctcctgctgccccc

SEQ ID NO: 1910050 - DNA, 15 bp, Homo sapiens
ctcctgctgcccccc

SEQ ID NO: 1910051 - DNA, 15 bp, Homo sapiens
tcctgctgcccccca

SEQ ID NO: 1910052 - DNA, 15 bp, Homo sapiens
cctgctgccccccat

SEQ ID NO: 1910053 - DNA, 15 bp, Homo sapiens
ctgctgccccccatt

SEQ ID NO: 1910054 - DNA, 15 bp, Homo sapiens
tgctgccccccattt

SEQ ID NO: 1910055 - DNA, 15 bp, Homo sapiens
gctgccccccatttc

SEQ ID NO: 1910056 - DNA, 15 bp, Homo sapiens
ctgccccccatttcc

SEQ ID NO: 1910057 - DNA, 15 bp, Homo sapiens
tgccccccatttcct

SEQ ID NO: 1910058 - DNA, 15 bp, Homo sapiens
gccccccatttccta

SEQ ID NO: 1910059 - DNA, 15 bp, Homo sapiens
ccccccatttcctac

SEQ ID NO: 1910060 - DNA, 15 bp, Homo sapiens
cccccatttcctaca

SEQ ID NO: 1910061 - DNA, 15 bp, Homo sapiens
ccccatttcctacag

SEQ ID NO: 1910062 - DNA, 15 bp, Homo sapiens
cccatttcctacaga

SEQ ID NO: 1910063 - DNA, 15 bp, Homo sapiens
ccatttcctacagaa

SEQ ID NO: 1910064 - DNA, 15 bp, Homo sapiens
catttcctacagaac

SEQ ID NO: 1910065 - DNA, 15 bp, Homo sapiens
atttcctacagaacg

SEQ ID NO: 1910066 - DNA, 15 bp, Homo sapiens
tttcctacagaacga

SEQ ID NO: 1910067 - DNA, 15 bp, Homo sapiens
ttcctacagaacgac

SEQ ID NO: 1910068 - DNA, 15 bp, Homo sapiens
tcctacagaacgacc

SEQ ID NO: 1910069 - DNA, 15 bp, Homo sapiens
cctacagaacgacct

SEQ ID NO: 1910070 - DNA, 15 bp, Homo sapiens
ctacagaacgacctg

SEQ ID NO: 1910071 - DNA, 15 bp, Homo sapiens
tacagaacgacctgc

SEQ ID NO: 1910072 - DNA, 15 bp, Homo sapiens
acagaacgacctgca

SEQ ID NO: 1910073 - DNA, 15 bp, Homo sapiens
cagaacgacctgcag

SEQ ID NO: 1910074 - DNA, 15 bp, Homo sapiens
agaacgacctgcagc

SEQ ID NO: 1910075 - DNA, 15 bp, Homo sapiens
gaacgacctgcagca

SEQ ID NO: 1910076 - DNA, 15 bp, Homo sapiens
aacgacctgcagcaa

SEQ ID NO: 1910077 - DNA, 15 bp, Homo sapiens
acgacctgcagcaat

SEQ ID NO: 1910078 - DNA, 15 bp, Homo sapiens
cgacctgcagcaata

SEQ ID NO: 1910079 - DNA, 15 bp, Homo sapiens
gacctgcagcaatac

SEQ ID NO: 1910080 - DNA, 15 bp, Homo sapiens
acctgcagcaatacc

SEQ ID NO: 1910081 - DNA, 15 bp, Homo sapiens
cctgcagcaatacca

SEQ ID NO: 1910082 - DNA, 15 bp, Homo sapiens
ctgcagcaataccat

SEQ ID NO: 1910083 - DNA, 15 bp, Homo sapiens
tgcagcaataccatt

SEQ ID NO: 1910084 - DNA, 15 bp, Homo sapiens
gcagcaataccattg

SEQ ID NO: 1910085 - DNA, 15 bp, Homo sapiens
cagcaataccattga

SEQ ID NO: 1910086 - DNA, 15 bp, Homo sapiens
agcaataccattgac

SEQ ID NO: 1910087 - DNA, 15 bp, Homo sapiens
gcaataccattgacc

SEQ ID NO: 1910088 - DNA, 15 bp, Homo sapiens
caataccattgacct

SEQ ID NO: 1910089 - DNA, 15 bp, Homo sapiens
aataccattgacctg

SEQ ID NO: 1910090 - DNA, 15 bp, Homo sapiens
ataccattgacctgc

SEQ ID NO: 1910091 - DNA, 15 bp, Homo sapiens
taccattgacctgcc

SEQ ID NO: 1910092 - DNA, 15 bp, Homo sapiens
accattgacctgccg

SEQ ID NO: 1910093 - DNA, 15 bp, Homo sapiens
ccattgacctgccga

SEQ ID NO: 1910094 - DNA, 15 bp, Homo sapiens
cattgacctgccgat

SEQ ID NO: 1910095 - DNA, 15 bp, Homo sapiens
attgacctgccgatg

SEQ ID NO: 1910096 - DNA, 15 bp, Homo sapiens
ttgacctgccgatgt

SEQ ID NO: 1910097 - DNA, 15 bp, Homo sapiens
tgacctgccgatgtc

SEQ ID NO: 1910098 - DNA, 15 bp, Homo sapiens
gacctgccgatgtcc

SEQ ID NO: 1910099 - DNA, 15 bp, Homo sapiens
acctgccgatgtccc

SEQ ID NO: 1910100 - DNA, 15 bp, Homo sapiens
cctgccgatgtcccc

SEQ ID NO: 1910101 - DNA, 15 bp, Homo sapiens
ctgccgatgtccccc

SEQ ID NO: 1910102 - DNA, 15 bp, Homo sapiens
tgccgatgtcccccc

SEQ ID NO: 1910103 - DNA, 15 bp, Homo sapiens
gccgatgtccccccg

SEQ ID NO: 1910104 - DNA, 15 bp, Homo sapiens
ccgatgtccccccgc

SEQ ID NO: 1910105 - DNA, 15 bp, Homo sapiens
cgatgtccccccgca

SEQ ID NO: 1910106 - DNA, 15 bp, Homo sapiens
gatgtccccccgcac

SEQ ID NO: 1910107 - DNA, 15 bp, Homo sapiens
atgtccccccgcact

SEQ ID NO: 1910108 - DNA, 15 bp, Homo sapiens
tgtccccccgcactt

SEQ ID NO: 1910109 - DNA, 15 bp, Homo sapiens
gtccccccgcacttt

SEQ ID NO: 1910110 - DNA, 15 bp, Homo sapiens
tccccccgcacttta

SEQ ID NO: 1910111 - DNA, 15 bp, Homo sapiens
ccccccgcactttag

SEQ ID NO: 1910112 - DNA, 15 bp, Homo sapiens
cccccgcactttaga

SEQ ID NO: 1910113 - DNA, 15 bp, Homo sapiens
ccccgcactttagat

SEQ ID NO: 1910114 - DNA, 15 bp, Homo sapiens
cccgcactttagatt

SEQ ID NO: 1910115 - DNA, 15 bp, Homo sapiens
ccgcactttagattc

SEQ ID NO: 1910116 - DNA, 15 bp, Homo sapiens
cgcactttagattca

SEQ ID NO: 1910117 - DNA, 15 bp, Homo sapiens
gcactttagattcat

SEQ ID NO: 1910118 - DNA, 15 bp, Homo sapiens
cactttagattcatt

SEQ ID NO: 1910119 - DNA, 15 bp, Homo sapiens
actttagattcattg

SEQ ID NO: 1910120 - DNA, 15 bp, Homo sapiens
ctttagattcattga

SEQ ID NO: 1910121 - DNA, 15 bp, Homo sapiens
tttagattcattgat

SEQ ID NO: 1910122 - DNA, 15 bp, Homo sapiens
ttagattcattgatg

SEQ ID NO: 1910123 - DNA, 15 bp, Homo sapiens
tagattcattgatgc

SEQ ID NO: 1910124 - DNA, 15 bp, Homo sapiens
agattcattgatgca

SEQ ID NO: 1910125 - DNA, 15 bp, Homo sapiens
gattcattgatgcag

SEQ ID NO: 1910126 - DNA, 15 bp, Homo sapiens
attcattgatgcagt

SEQ ID NO: 1910127 - DNA, 15 bp, Homo sapiens
ttcattgatgcagtt

SEQ ID NO: 1910128 - DNA, 15 bp, Homo sapiens
tcattgatgcagttt

SEQ ID NO: 1910129 - DNA, 15 bp, Homo sapiens
cattgatgcagtttg

SEQ ID NO: 1910130 - DNA, 15 bp, Homo sapiens
attgatgcagtttgg

SEQ ID NO: 1910131 - DNA, 15 bp, Homo sapiens
ttgatgcagtttgga

SEQ ID NO: 1910132 - DNA, 15 bp, Homo sapiens
tgatgcagtttggaa

SEQ ID NO: 1910133 - DNA, 15 bp, Homo sapiens
gatgcagtttggaaa

SEQ ID NO: 1910134 - DNA, 15 bp, Homo sapiens
atgcagtttggaaat

SEQ ID NO: 1910135 - DNA, 15 bp, Homo sapiens
tgcagtttggaaata

SEQ ID NO: 1910136 - DNA, 15 bp, Homo sapiens
gcagtttggaaataa

SEQ ID NO: 1910137 - DNA, 15 bp, Homo sapiens
cagtttggaaataat

SEQ ID NO: 1910138 - DNA, 15 bp, Homo sapiens
agtttggaaataatg

SEQ ID NO: 1910139 - DNA, 15 bp, Homo sapiens
gtttggaaataatgg

SEQ ID NO: 1910140 - DNA, 15 bp, Homo sapiens
tttggaaataatggt

SEQ ID NO: 1910141 - DNA, 15 bp, Homo sapiens
ttggaaataatggtg

SEQ ID NO: 1910142 - DNA, 15 bp, Homo sapiens
tggaaataatggtga

SEQ ID NO: 1910143 - DNA, 15 bp, Homo sapiens
ggaaataatggtgaa

SEQ ID NO: 1910144 - DNA, 15 bp, Homo sapiens
gaaataatggtgaag

SEQ ID NO: 1910145 - DNA, 15 bp, Homo sapiens
aaataatggtgaagg

SEQ ID NO: 1910146 - DNA, 15 bp, Homo sapiens
aataatggtgaaggt

SEQ ID NO: 1910147 - DNA, 15 bp, Homo sapiens
ataatggtgaaggtg

SEQ ID NO: 1910148 - DNA, 15 bp, Homo sapiens
taatggtgaaggtgc

SEQ ID NO: 1910149 - DNA, 15 bp, Homo sapiens
aatggtgaaggtgct

SEQ ID NO: 1910150 - DNA, 15 bp, Homo sapiens
atggtgaaggtgctg

SEQ ID NO: 1910151 - DNA, 15 bp, Homo sapiens
tggtgaaggtgctga

SEQ ID NO: 1910152 - DNA, 15 bp, Homo sapiens
ggtgaaggtgctgaa

SEQ ID NO: 1910153 - DNA, 15 bp, Homo sapiens
gtgaaggtgctgaac

SEQ ID NO: 1910154 - DNA, 15 bp, Homo sapiens
tgaaggtgctgaacc

SEQ ID NO: 1910155 - DNA, 15 bp, Homo sapiens
gaaggtgctgaaccc

SEQ ID NO: 1910156 - DNA, 15 bp, Homo sapiens
aaggtgctgaaccct

SEQ ID NO: 1910157 - DNA, 15 bp, Homo sapiens
aggtgctgaaccctc

SEQ ID NO: 1910158 - DNA, 15 bp, Homo sapiens
ggtgctgaaccctca

SEQ ID NO: 1910159 - DNA, 15 bp, Homo sapiens
gtgctgaaccctcag

SEQ ID NO: 1910160 - DNA, 15 bp, Homo sapiens
tgctgaaccctcagc

SEQ ID NO: 1910161 - DNA, 15 bp, Homo sapiens
gctgaaccctcagca

SEQ ID NO: 1910162 - DNA, 15 bp, Homo sapiens
ctgaaccctcagcag

SEQ ID NO: 1910163 - DNA, 15 bp, Homo sapiens
tgaaccctcagcagg

SEQ ID NO: 1910164 - DNA, 15 bp, Homo sapiens
gaaccctcagcagga

SEQ ID NO: 1910165 - DNA, 15 bp, Homo sapiens
aaccctcagcaggag

SEQ ID NO: 1910166 - DNA, 15 bp, Homo sapiens
accctcagcaggagg

SEQ ID NO: 1910167 - DNA, 15 bp, Homo sapiens
ccctcagcaggaggg

SEQ ID NO: 1910168 - DNA, 15 bp, Homo sapiens
cctcagcaggagggc

SEQ ID NO: 1910169 - DNA, 15 bp, Homo sapiens
ctcagcaggagggca

SEQ ID NO: 1910170 - DNA, 15 bp, Homo sapiens
tcagcaggagggcag

SEQ ID NO: 1910171 - DNA, 15 bp, Homo sapiens
cagcaggagggcagt

SEQ ID NO: 1910172 - DNA, 15 bp, Homo sapiens
agcaggagggcagtt

SEQ ID NO: 1910173 - DNA, 15 bp, Homo sapiens
gcaggagggcagttt

SEQ ID NO: 1910174 - DNA, 15 bp, Homo sapiens
caggagggcagtttg

SEQ ID NO: 1910175 - DNA, 15 bp, Homo sapiens
aggagggcagtttgg

SEQ ID NO: 1910176 - DNA, 15 bp, Homo sapiens
ggagggcagtttggt

SEQ ID NO: 1910177 - DNA, 15 bp, Homo sapiens
gagggcagtttggtg

SEQ ID NO: 1910178 - DNA, 15 bp, Homo sapiens
agggcagtttggtga

SEQ ID NO: 1910179 - DNA, 15 bp, Homo sapiens
gggcagtttggtgag

SEQ ID NO: 1910180 - DNA, 15 bp, Homo sapiens
ggcagtttggtgagt

SEQ ID NO: 1910181 - DNA, 15 bp, Homo sapiens
gcagtttggtgagta

SEQ ID NO: 1910182 - DNA, 15 bp, Homo sapiens
cagtttggtgagtat

SEQ ID NO: 1910183 - DNA, 15 bp, Homo sapiens
agtttggtgagtatt

SEQ ID NO: 1910184 - DNA, 15 bp, Homo sapiens
gtttggtgagtattt

SEQ ID NO: 1910185 - DNA, 15 bp, Homo sapiens
tttggtgagtatttg

SEQ ID NO: 1910186 - DNA, 15 bp, Homo sapiens
ttggtgagtatttgg

SEQ ID NO: 1910187 - DNA, 15 bp, Homo sapiens
tggtgagtatttggt

SEQ ID NO: 1910188 - DNA, 15 bp, Homo sapiens
ggtgagtatttggtt

SEQ ID NO: 1910189 - DNA, 15 bp, Homo sapiens
gtgagtatttggttg

SEQ ID NO: 1910190 - DNA, 15 bp, Homo sapiens
tgagtatttggttga

SEQ ID NO: 1910191 - DNA, 15 bp, Homo sapiens
gagtatttggttgac

SEQ ID NO: 1910192 - DNA, 15 bp, Homo sapiens
agtatttggttgaca

SEQ ID NO: 1910193 - DNA, 15 bp, Homo sapiens
gtatttggttgacag

SEQ ID NO: 1910194 - DNA, 15 bp, Homo sapiens
tatttggttgacaga

SEQ ID NO: 1910195 - DNA, 15 bp, Homo sapiens
atttggttgacagac

SEQ ID NO: 1910196 - DNA, 15 bp, Homo sapiens
tttggttgacagact

SEQ ID NO: 1910197 - DNA, 15 bp, Homo sapiens
ttggttgacagactt

SEQ ID NO: 1910198 - DNA, 15 bp, Homo sapiens
tggttgacagacttt

SEQ ID NO: 1910199 - DNA, 15 bp, Homo sapiens
ggttgacagactttg

SEQ ID NO: 1910200 - DNA, 15 bp, Homo sapiens
gttgacagactttgt

SEQ ID NO: 1910201 - DNA, 15 bp, Homo sapiens
ttgacagactttgtc

SEQ ID NO: 1910202 - DNA, 15 bp, Homo sapiens
tgacagactttgtcc

SEQ ID NO: 1910203 - DNA, 15 bp, Homo sapiens
gacagactttgtccc

SEQ ID NO: 1910204 - DNA, 15 bp, Homo sapiens
acagactttgtccct

SEQ ID NO: 1910205 - DNA, 15 bp, Homo sapiens
cagactttgtcccta

SEQ ID NO: 1910206 - DNA, 15 bp, Homo sapiens
agactttgtccctat

SEQ ID NO: 1910207 - DNA, 15 bp, Homo sapiens
gactttgtccctata

SEQ ID NO: 1910208 - DNA, 15 bp, Homo sapiens
actttgtccctataa

SEQ ID NO: 1910209 - DNA, 15 bp, Homo sapiens
ctttgtccctataag

SEQ ID NO: 1910210 - DNA, 15 bp, Homo sapiens
tttgtccctataagg

SEQ ID NO: 1910211 - DNA, 15 bp, Homo sapiens
ttgtccctataaggg

SEQ ID NO: 1910212 - DNA, 15 bp, Homo sapiens
tgtccctataaggga

SEQ ID NO: 1910213 - DNA, 15 bp, Homo sapiens
gtccctataagggaa

SEQ ID NO: 1910214 - DNA, 15 bp, Homo sapiens
tccctataagggaag

SEQ ID NO: 1910215 - DNA, 15 bp, Homo sapiens
ccctataagggaagt

SEQ ID NO: 1910216 - DNA, 15 bp, Homo sapiens
cctataagggaagtt

SEQ ID NO: 1910217 - DNA, 15 bp, Homo sapiens
ctataagggaagttg

SEQ ID NO: 1910218 - DNA, 15 bp, Homo sapiens
tataagggaagttgg

SEQ ID NO: 1910219 - DNA, 15 bp, Homo sapiens
ataagggaagttggt

SEQ ID NO: 1910220 - DNA, 15 bp, Homo sapiens
taagggaagttggtc

SEQ ID NO: 1910221 - DNA, 15 bp, Homo sapiens
aagggaagttggtcc

SEQ ID NO: 1910222 - DNA, 15 bp, Homo sapiens
agggaagttggtccc

SEQ ID NO: 1910223 - DNA, 15 bp, Homo sapiens
gggaagttggtcccc

SEQ ID NO: 1910224 - DNA, 15 bp, Homo sapiens
ggaagttggtcccct

SEQ ID NO: 1910225 - DNA, 15 bp, Homo sapiens
gaagttggtcccctt

SEQ ID NO: 1910226 - DNA, 15 bp, Homo sapiens
aagttggtccccttt

SEQ ID NO: 1910227 - DNA, 15 bp, Homo sapiens
agttggtcccctttg

SEQ ID NO: 1910228 - DNA, 15 bp, Homo sapiens
gttggtcccctttgt

SEQ ID NO: 1910229 - DNA, 15 bp, Homo sapiens
ttggtcccctttgtg

SEQ ID NO: 1910230 - DNA, 15 bp, Homo sapiens
tggtcccctttgtgt

SEQ ID NO: 1910231 - DNA, 15 bp, Homo sapiens
ggtcccctttgtgtg

SEQ ID NO: 1910232 - DNA, 15 bp, Homo sapiens
gtcccctttgtgtga

SEQ ID NO: 1910233 - DNA, 15 bp, Homo sapiens
tcccctttgtgtgat

SEQ ID NO: 1910234 - DNA, 15 bp, Homo sapiens
cccctttgtgtgatg

SEQ ID NO: 1910235 - DNA, 15 bp, Homo sapiens
ccctttgtgtgatgc

SEQ ID NO: 1910236 - DNA, 15 bp, Homo sapiens
cctttgtgtgatgct

SEQ ID NO: 1910237 - DNA, 15 bp, Homo sapiens
ctttgtgtgatgctc

SEQ ID NO: 1910238 - DNA, 15 bp, Homo sapiens
tttgtgtgatgctct

SEQ ID NO: 1910239 - DNA, 15 bp, Homo sapiens
ttgtgtgatgctctc

SEQ ID NO: 1910240 - DNA, 15 bp, Homo sapiens
tgtgtgatgctctca

SEQ ID NO: 1910241 - DNA, 15 bp, Homo sapiens
gtgtgatgctctcac

SEQ ID NO: 1910242 - DNA, 15 bp, Homo sapiens
tgtgatgctctcaca

SEQ ID NO: 1910243 - DNA, 15 bp, Homo sapiens
gtgatgctctcacat

SEQ ID NO: 1910244 - DNA, 15 bp, Homo sapiens
tgatgctctcacatg

SEQ ID NO: 1910245 - DNA, 15 bp, Homo sapiens
gatgctctcacatgt

SEQ ID NO: 1910246 - DNA, 15 bp, Homo sapiens
atgctctcacatgta

SEQ ID NO: 1910247 - DNA, 15 bp, Homo sapiens
tgctctcacatgtac

SEQ ID NO: 1910248 - DNA, 15 bp, Homo sapiens
gctctcacatgtaca

SEQ ID NO: 1910249 - DNA, 15 bp, Homo sapiens
ctctcacatgtacac

SEQ ID NO: 1910250 - DNA, 15 bp, Homo sapiens
tctcacatgtacaca

SEQ ID NO: 1910251 - DNA, 15 bp, Homo sapiens
ctcacatgtacacac

SEQ ID NO: 1910252 - DNA, 15 bp, Homo sapiens
tcacatgtacacacc

SEQ ID NO: 1910253 - DNA, 15 bp, Homo sapiens
cacatgtacacaccg

SEQ ID NO: 1910254 - DNA, 15 bp, Homo sapiens
acatgtacacaccga

SEQ ID NO: 1910255 - DNA, 15 bp, Homo sapiens
catgtacacaccgag

SEQ ID NO: 1910256 - DNA, 15 bp, Homo sapiens
atgtacacaccgaga

SEQ ID NO: 1910257 - DNA, 15 bp, Homo sapiens
tgtacacaccgagag

SEQ ID NO: 1910258 - DNA, 15 bp, Homo sapiens
gtacacaccgagagc

SEQ ID NO: 1910259 - DNA, 15 bp, Homo sapiens
tacacaccgagagct

SEQ ID NO: 1910260 - DNA, 15 bp, Homo sapiens
acacaccgagagctg

SEQ ID NO: 1910261 - DNA, 15 bp, Homo sapiens
cacaccgagagctgg

SEQ ID NO: 1910262 - DNA, 15 bp, Homo sapiens
acaccgagagctggt

SEQ ID NO: 1910263 - DNA, 15 bp, Homo sapiens
caccgagagctggtc

SEQ ID NO: 1910264 - DNA, 15 bp, Homo sapiens
accgagagctggtca

SEQ ID NO: 1910265 - DNA, 15 bp, Homo sapiens
ccgagagctggtcac

SEQ ID NO: 1910266 - DNA, 15 bp, Homo sapiens
cgagagctggtcact

SEQ ID NO: 1910267 - DNA, 15 bp, Homo sapiens
gagagctggtcactc

SEQ ID NO: 1910268 - DNA, 15 bp, Homo sapiens
agagctggtcactcg

SEQ ID NO: 1910269 - DNA, 15 bp, Homo sapiens
gagctggtcactcgg

SEQ ID NO: 1910270 - DNA, 15 bp, Homo sapiens
agctggtcactcgga

SEQ ID NO: 1910271 - DNA, 15 bp, Homo sapiens
gctggtcactcggaa

SEQ ID NO: 1910272 - DNA, 15 bp, Homo sapiens
ctggtcactcggaat

SEQ ID NO: 1910273 - DNA, 15 bp, Homo sapiens
tggtcactcggaatg

SEQ ID NO: 1910274 - DNA, 15 bp, Homo sapiens
ggtcactcggaatgg

SEQ ID NO: 1910275 - DNA, 15 bp, Homo sapiens
gtcactcggaatggt

SEQ ID NO: 1910276 - DNA, 15 bp, Homo sapiens
tcactcggaatggta

SEQ ID NO: 1910277 - DNA, 15 bp, Homo sapiens
cactcggaatggtag

SEQ ID NO: 1910278 - DNA, 15 bp, Homo sapiens
actcggaatggtagg

SEQ ID NO: 1910279 - DNA, 15 bp, Homo sapiens
ctcggaatggtagga

SEQ ID NO: 1910280 - DNA, 15 bp, Homo sapiens
tcggaatggtaggag

SEQ ID NO: 1910281 - DNA, 15 bp, Homo sapiens
cggaatggtaggaga

SEQ ID NO: 1910282 - DNA, 15 bp, Homo sapiens
ggaatggtaggagat

SEQ ID NO: 1910283 - DNA, 15 bp, Homo sapiens
gaatggtaggagatt

SEQ ID NO: 1910284 - DNA, 15 bp, Homo sapiens
aatggtaggagattc

SEQ ID NO: 1910285 - DNA, 15 bp, Homo sapiens
atggtaggagattct

SEQ ID NO: 1910286 - DNA, 15 bp, Homo sapiens
tggtaggagattcta

SEQ ID NO: 1910287 - DNA, 15 bp, Homo sapiens
ggtaggagattctag

SEQ ID NO: 1910288 - DNA, 15 bp, Homo sapiens
gtaggagattctaga

SEQ ID NO: 1910289 - DNA, 15 bp, Homo sapiens
taggagattctagag

SEQ ID NO: 1910290 - DNA, 15 bp, Homo sapiens
aggagattctagagc

SEQ ID NO: 1910291 - DNA, 15 bp, Homo sapiens
ggagattctagagct

SEQ ID NO: 1910292 - DNA, 15 bp, Homo sapiens
gagattctagagctt

SEQ ID NO: 1910293 - DNA, 15 bp, Homo sapiens
agattctagagcttt

SEQ ID NO: 1910294 - DNA, 15 bp, Homo sapiens
gattctagagctttg

SEQ ID NO: 1910295 - DNA, 15 bp, Homo sapiens
attctagagctttgc

SEQ ID NO: 1910296 - DNA, 15 bp, Homo sapiens
ttctagagctttgct

SEQ ID NO: 1910297 - DNA, 15 bp, Homo sapiens
tctagagctttgctt

SEQ ID NO: 1910298 - DNA, 15 bp, Homo sapiens
ctagagctttgcttt

SEQ ID NO: 1910299 - DNA, 15 bp, Homo sapiens
tagagctttgctttc

SEQ ID NO: 1910300 - DNA, 15 bp, Homo sapiens
agagctttgctttcc

SEQ ID NO: 1910301 - DNA, 15 bp, Homo sapiens
gagctttgctttcca

SEQ ID NO: 1910302 - DNA, 15 bp, Homo sapiens
agctttgctttccaa

SEQ ID NO: 1910303 - DNA, 15 bp, Homo sapiens
gctttgctttccaaa

SEQ ID NO: 1910304 - DNA, 15 bp, Homo sapiens
ctttgctttccaaaa

SEQ ID NO: 1910305 - DNA, 15 bp, Homo sapiens
tttgctttccaaaag

SEQ ID NO: 1910306 - DNA, 15 bp, Homo sapiens
ttgctttccaaaaga

SEQ ID NO: 1910307 - DNA, 15 bp, Homo sapiens
tgctttccaaaagag

SEQ ID NO: 1910308 - DNA, 15 bp, Homo sapiens
gctttccaaaagaga

SEQ ID NO: 1910309 - DNA, 15 bp, Homo sapiens
ctttccaaaagagat

SEQ ID NO: 1910310 - DNA, 15 bp, Homo sapiens
tttccaaaagagatg

SEQ ID NO: 1910311 - DNA, 15 bp, Homo sapiens
ttccaaaagagatgg

SEQ ID NO: 1910312 - DNA, 15 bp, Homo sapiens
tccaaaagagatggt

SEQ ID NO: 1910313 - DNA, 15 bp, Homo sapiens
ccaaaagagatggta

SEQ ID NO: 1910314 - DNA, 15 bp, Homo sapiens
caaaagagatggtat

SEQ ID NO: 1910315 - DNA, 15 bp, Homo sapiens
aaaagagatggtatg

SEQ ID NO: 1910316 - DNA, 15 bp, Homo sapiens
aaagagatggtatga

SEQ ID NO: 1910317 - DNA, 15 bp, Homo sapiens
aagagatggtatgaa

SEQ ID NO: 1910318 - DNA, 15 bp, Homo sapiens
agagatggtatgaat

SEQ ID NO: 1910319 - DNA, 15 bp, Homo sapiens
gagatggtatgaatg

SEQ ID NO: 1910320 - DNA, 15 bp, Homo sapiens
agatggtatgaatgc

SEQ ID NO: 1910321 - DNA, 15 bp, Homo sapiens
gatggtatgaatgcc

SEQ ID NO: 1910322 - DNA, 15 bp, Homo sapiens
atggtatgaatgcca

SEQ ID NO: 1910323 - DNA, 15 bp, Homo sapiens
tggtatgaatgccac

SEQ ID NO: 1910324 - DNA, 15 bp, Homo sapiens
ggtatgaatgccaca

SEQ ID NO: 1910325 - DNA, 15 bp, Homo sapiens
gtatgaatgccacat

SEQ ID NO: 1910326 - DNA, 15 bp, Homo sapiens
tatgaatgccacatg

SEQ ID NO: 1910327 - DNA, 15 bp, Homo sapiens
atgaatgccacatgt

SEQ ID NO: 1910328 - DNA, 15 bp, Homo sapiens
tgaatgccacatgtg

SEQ ID NO: 1910329 - DNA, 15 bp, Homo sapiens
gaatgccacatgtgt

SEQ ID NO: 1910330 - DNA, 15 bp, Homo sapiens
aatgccacatgtgtg

SEQ ID NO: 1910331 - DNA, 15 bp, Homo sapiens
atgccacatgtgtga

SEQ ID NO: 1910332 - DNA, 15 bp, Homo sapiens
tgccacatgtgtgag

SEQ ID NO: 1910333 - DNA, 15 bp, Homo sapiens
gccacatgtgtgagt

SEQ ID NO: 1910334 - DNA, 15 bp, Homo sapiens
ccacatgtgtgagta

SEQ ID NO: 1910335 - DNA, 15 bp, Homo sapiens
cacatgtgtgagtat

SEQ ID NO: 1910336 - DNA, 15 bp, Homo sapiens
acatgtgtgagtata

SEQ ID NO: 1910337 - DNA, 15 bp, Homo sapiens
catgtgtgagtataa

SEQ ID NO: 1910338 - DNA, 15 bp, Homo sapiens
atgtgtgagtataaa

SEQ ID NO: 1910339 - DNA, 15 bp, Homo sapiens
tgtgtgagtataaat

SEQ ID NO: 1910340 - DNA, 15 bp, Homo sapiens
gtgtgagtataaatc

SEQ ID NO: 1910341 - DNA, 15 bp, Homo sapiens
tgtgagtataaatct

SEQ ID NO: 1910342 - DNA, 15 bp, Homo sapiens
gtgagtataaatctt

SEQ ID NO: 1910343 - DNA, 15 bp, Homo sapiens
tgagtataaatcttc

SEQ ID NO: 1910344 - DNA, 15 bp, Homo sapiens
gagtataaatcttct

SEQ ID NO: 1910345 - DNA, 15 bp, Homo sapiens
agtataaatcttcta

SEQ ID NO: 1910346 - DNA, 15 bp, Homo sapiens
gtataaatcttctag

SEQ ID NO: 1910347 - DNA, 15 bp, Homo sapiens
tataaatcttctagc

SEQ ID NO: 1910348 - DNA, 15 bp, Homo sapiens
ataaatcttctagca

SEQ ID NO: 1910349 - DNA, 15 bp, Homo sapiens
taaatcttctagcag

SEQ ID NO: 1910350 - DNA, 15 bp, Homo sapiens
aaatcttctagcagc

SEQ ID NO: 1910351 - DNA, 15 bp, Homo sapiens
aatcttctagcagcc

SEQ ID NO: 1910352 - DNA, 15 bp, Homo sapiens
atcttctagcagcca

SEQ ID NO: 1910353 - DNA, 15 bp, Homo sapiens
tcttctagcagccac

SEQ ID NO: 1910354 - DNA, 15 bp, Homo sapiens
cttctagcagccaca

SEQ ID NO: 1910355 - DNA, 15 bp, Homo sapiens
ttctagcagccacac

SEQ ID NO: 1910356 - DNA, 15 bp, Homo sapiens
tctagcagccacact

SEQ ID NO: 1910357 - DNA, 15 bp, Homo sapiens
ctagcagccacactg

SEQ ID NO: 1910358 - DNA, 15 bp, Homo sapiens
tagcagccacactgg

SEQ ID NO: 1910359 - DNA, 15 bp, Homo sapiens
agcagccacactgga

SEQ ID NO: 1910360 - DNA, 15 bp, Homo sapiens
gcagccacactggaa

SEQ ID NO: 1910361 - DNA, 15 bp, Homo sapiens
cagccacactggaaa

SEQ ID NO: 1910362 - DNA, 15 bp, Homo sapiens
agccacactggaaat

SEQ ID NO: 1910363 - DNA, 15 bp, Homo sapiens
gccacactggaaata

SEQ ID NO: 1910364 - DNA, 15 bp, Homo sapiens
ccacactggaaatag

SEQ ID NO: 1910365 - DNA, 15 bp, Homo sapiens
cacactggaaataga

SEQ ID NO: 1910366 - DNA, 15 bp, Homo sapiens
acactggaaatagac

SEQ ID NO: 1910367 - DNA, 15 bp, Homo sapiens
cactggaaatagacg

SEQ ID NO: 1910368 - DNA, 15 bp, Homo sapiens
actggaaatagacga

SEQ ID NO: 1910369 - DNA, 15 bp, Homo sapiens
ctggaaatagacgaa

SEQ ID NO: 1910370 - DNA, 15 bp, Homo sapiens
tggaaatagacgaac

SEQ ID NO: 1910371 - DNA, 15 bp, Homo sapiens
ggaaatagacgaact

SEQ ID NO: 1910372 - DNA, 15 bp, Homo sapiens
gaaatagacgaactt

SEQ ID NO: 1910373 - DNA, 15 bp, Homo sapiens
aaatagacgaactta

SEQ ID NO: 1910374 - DNA, 15 bp, Homo sapiens
aatagacgaacttaa

SEQ ID NO: 1910375 - DNA, 15 bp, Homo sapiens
atagacgaacttaat

SEQ ID NO: 1910376 - DNA, 15 bp, Homo sapiens
tagacgaacttaatt

SEQ ID NO: 1910377 - DNA, 15 bp, Homo sapiens
agacgaacttaattt

SEQ ID NO: 1910378 - DNA, 15 bp, Homo sapiens
gacgaacttaatttt

SEQ ID NO: 1910379 - DNA, 15 bp, Homo sapiens
acgaacttaattttt

SEQ ID NO: 1910380 - DNA, 15 bp, Homo sapiens
cgaacttaattttta

SEQ ID NO: 1910381 - DNA, 15 bp, Homo sapiens
gaacttaatttttac

SEQ ID NO: 1910382 - DNA, 15 bp, Homo sapiens
aacttaatttttaca

SEQ ID NO: 1910383 - DNA, 15 bp, Homo sapiens
acttaatttttacaa

SEQ ID NO: 1910384 - DNA, 15 bp, Homo sapiens
cttaatttttacaat

SEQ ID NO: 1910385 - DNA, 15 bp, Homo sapiens
ttaatttttacaata

SEQ ID NO: 1910386 - DNA, 15 bp, Homo sapiens
taatttttacaatat

SEQ ID NO: 1910387 - DNA, 15 bp, Homo sapiens
aatttttacaatata

SEQ ID NO: 1910388 - DNA, 15 bp, Homo sapiens
atttttacaatatat

SEQ ID NO: 1910389 - DNA, 15 bp, Homo sapiens
tttttacaatatatt

SEQ ID NO: 1910390 - DNA, 15 bp, Homo sapiens
ttttacaatatattt

SEQ ID NO: 1910391 - DNA, 15 bp, Homo sapiens
tttacaatatatttt

SEQ ID NO: 1910392 - DNA, 15 bp, Homo sapiens
ttacaatatatttta

SEQ ID NO: 1910393 - DNA, 15 bp, Homo sapiens
tacaatatattttat

SEQ ID NO: 1910394 - DNA, 15 bp, Homo sapiens
acaatatattttatt

SEQ ID NO: 1910395 - DNA, 15 bp, Homo sapiens
caatatattttattt

SEQ ID NO: 1910396 - DNA, 15 bp, Homo sapiens
ttttatttaacccac

SEQ ID NO: 1910397 - DNA, 15 bp, Homo sapiens
tttatttaacccact

SEQ ID NO: 1910398 - DNA, 15 bp, Homo sapiens
ttatttaacccacta

SEQ ID NO: 1910399 - DNA, 15 bp, Homo sapiens
tatttaacccactaa

SEQ ID NO: 1910400 - DNA, 15 bp, Homo sapiens
atttaacccactaaa

SEQ ID NO: 1910401 - DNA, 15 bp, Homo sapiens
tttaacccactaaat

SEQ ID NO: 1910402 - DNA, 15 bp, Homo sapiens
ttaacccactaaatc

SEQ ID NO: 1910403 - DNA, 15 bp, Homo sapiens
taacccactaaatcc

SEQ ID NO: 1910404 - DNA, 15 bp, Homo sapiens
aacccactaaatcca

SEQ ID NO: 1910405 - DNA, 15 bp, Homo sapiens
acccactaaatccaa

SEQ ID NO: 1910406 - DNA, 15 bp, Homo sapiens
cccactaaatccaac

SEQ ID NO: 1910407 - DNA, 15 bp, Homo sapiens
ccactaaatccaaca

SEQ ID NO: 1910408 - DNA, 15 bp, Homo sapiens
cactaaatccaacat

SEQ ID NO: 1910409 - DNA, 15 bp, Homo sapiens
actaaatccaacata

SEQ ID NO: 1910410 - DNA, 15 bp, Homo sapiens
ctaaatccaacatac

SEQ ID NO: 1910411 - DNA, 15 bp, Homo sapiens
taaatccaacatact

SEQ ID NO: 1910412 - DNA, 15 bp, Homo sapiens
aaatccaacatactc

SEQ ID NO: 1910413 - DNA, 15 bp, Homo sapiens
aatccaacatactct

SEQ ID NO: 1910414 - DNA, 15 bp, Homo sapiens
atccaacatactctc

SEQ ID NO: 1910415 - DNA, 15 bp, Homo sapiens
tccaacatactctca

SEQ ID NO: 1910416 - DNA, 15 bp, Homo sapiens
ccaacatactctcaa

SEQ ID NO: 1910417 - DNA, 15 bp, Homo sapiens
caacatactctcaat

SEQ ID NO: 1910418 - DNA, 15 bp, Homo sapiens
aacatactctcaatt

SEQ ID NO: 1910419 - DNA, 15 bp, Homo sapiens
acatactctcaattt

SEQ ID NO: 1910420 - DNA, 15 bp, Homo sapiens
catactctcaattta

SEQ ID NO: 1910421 - DNA, 15 bp, Homo sapiens
atactctcaatttaa

SEQ ID NO: 1910422 - DNA, 15 bp, Homo sapiens
tactctcaatttaac

SEQ ID NO: 1910423 - DNA, 15 bp, Homo sapiens
actctcaatttaaca

SEQ ID NO: 1910424 - DNA, 15 bp, Homo sapiens
ctctcaatttaacat

SEQ ID NO: 1910425 - DNA, 15 bp, Homo sapiens
tctcaatttaacatt

SEQ ID NO: 1910426 - DNA, 15 bp, Homo sapiens
ctcaatttaacattt

SEQ ID NO: 1910427 - DNA, 15 bp, Homo sapiens
tcaatttaacatttc

SEQ ID NO: 1910428 - DNA, 15 bp, Homo sapiens
caatttaacatttca

SEQ ID NO: 1910429 - DNA, 15 bp, Homo sapiens
aatttaacatttcag

SEQ ID NO: 1910430 - DNA, 15 bp, Homo sapiens
atttaacatttcaga

SEQ ID NO: 1910431 - DNA, 15 bp, Homo sapiens
tttaacatttcagaa

SEQ ID NO: 1910432 - DNA, 15 bp, Homo sapiens
ttaacatttcagaaa

SEQ ID NO: 1910433 - DNA, 15 bp, Homo sapiens
taacatttcagaaaa

SEQ ID NO: 1910434 - DNA, 15 bp, Homo sapiens
aacatttcagaaaaa

SEQ ID NO: 1910435 - DNA, 15 bp, Homo sapiens
acatttcagaaaaag

SEQ ID NO: 1910436 - DNA, 15 bp, Homo sapiens
catttcagaaaaagt

SEQ ID NO: 1910437 - DNA, 15 bp, Homo sapiens
atttcagaaaaagtt

SEQ ID NO: 1910438 - DNA, 15 bp, Homo sapiens
tttcagaaaaagttg

SEQ ID NO: 1910439 - DNA, 15 bp, Homo sapiens
ttcagaaaaagttga

SEQ ID NO: 1910440 - DNA, 15 bp, Homo sapiens
tcagaaaaagttgag

SEQ ID NO: 1910441 - DNA, 15 bp, Homo sapiens
cagaaaaagttgagg

SEQ ID NO: 1910442 - DNA, 15 bp, Homo sapiens
agaaaaagttgaggc

SEQ ID NO: 1910443 - DNA, 15 bp, Homo sapiens
gaaaaagttgaggct

SEQ ID NO: 1910444 - DNA, 15 bp, Homo sapiens
aaaaagttgaggctg

SEQ ID NO: 1910445 - DNA, 15 bp, Homo sapiens
aaaagttgaggctgg

SEQ ID NO: 1910446 - DNA, 15 bp, Homo sapiens
aaagttgaggctggg

SEQ ID NO: 1910447 - DNA, 15 bp, Homo sapiens
aagttgaggctgggt

SEQ ID NO: 1910448 - DNA, 15 bp, Homo sapiens
agttgaggctgggtg

SEQ ID NO: 1910449 - DNA, 15 bp, Homo sapiens
gttgaggctgggtga

SEQ ID NO: 1910450 - DNA, 15 bp, Homo sapiens
ttgaggctgggtgag

SEQ ID NO: 1910451 - DNA, 15 bp, Homo sapiens
tgaggctgggtgagt

SEQ ID NO: 1910452 - DNA, 15 bp, Homo sapiens
gaggctgggtgagtg

SEQ ID NO: 1910453 - DNA, 15 bp, Homo sapiens
aggctgggtgagtgg

SEQ ID NO: 1910454 - DNA, 15 bp, Homo sapiens
ggctgggtgagtggc

SEQ ID NO: 1910455 - DNA, 15 bp, Homo sapiens
gctgggtgagtggct

SEQ ID NO: 1910456 - DNA, 15 bp, Homo sapiens
ctgggtgagtggctc

SEQ ID NO: 1910457 - DNA, 15 bp, Homo sapiens
tgggtgagtggctca

SEQ ID NO: 1910458 - DNA, 15 bp, Homo sapiens
gggtgagtggctcat

SEQ ID NO: 1910459 - DNA, 15 bp, Homo sapiens
ggtgagtggctcatg

SEQ ID NO: 1910460 - DNA, 15 bp, Homo sapiens
gtgagtggctcatgc

SEQ ID NO: 1910461 - DNA, 15 bp, Homo sapiens
tgagtggctcatgcc

SEQ ID NO: 1910462 - DNA, 15 bp, Homo sapiens
gaggccgaggtgggt

SEQ ID NO: 1910463 - DNA, 15 bp, Homo sapiens
aggccgaggtgggtg

SEQ ID NO: 1910464 - DNA, 15 bp, Homo sapiens
ggccgaggtgggtgg

SEQ ID NO: 1910465 - DNA, 15 bp, Homo sapiens
accagtctgaccaaa

SEQ ID NO: 1910466 - DNA, 15 bp, Homo sapiens
ccagtctgaccaaaa

SEQ ID NO: 1910467 - DNA, 15 bp, Homo sapiens
cagtctgaccaaaat

SEQ ID NO: 1910468 - DNA, 15 bp, Homo sapiens
agtctgaccaaaatc

SEQ ID NO: 1910469 - DNA, 15 bp, Homo sapiens
gtctgaccaaaatct

SEQ ID NO: 1910470 - DNA, 15 bp, Homo sapiens
tctgaccaaaatctc

SEQ ID NO: 1910471 - DNA, 15 bp, Homo sapiens
ctgaccaaaatctct

SEQ ID NO: 1910472 - DNA, 15 bp, Homo sapiens
tgaccaaaatctcta

SEQ ID NO: 1910473 - DNA, 15 bp, Homo sapiens
gaccaaaatctctaa

SEQ ID NO: 1910474 - DNA, 15 bp, Homo sapiens
accaaaatctctaaa

SEQ ID NO: 1910475 - DNA, 15 bp, Homo sapiens
ccaaaatctctaaaa

SEQ ID NO: 1910476 - DNA, 15 bp, Homo sapiens
caaaatctctaaaat

SEQ ID NO: 1910477 - DNA, 15 bp, Homo sapiens
aaaatctctaaaata

SEQ ID NO: 1910478 - DNA, 15 bp, Homo sapiens
aaatctctaaaatat

SEQ ID NO: 1910479 - DNA, 15 bp, Homo sapiens
aatctctaaaatata

SEQ ID NO: 1910480 - DNA, 15 bp, Homo sapiens
atctctaaaatataa

SEQ ID NO: 1910481 - DNA, 15 bp, Homo sapiens
tctctaaaatataaa

SEQ ID NO: 1910482 - DNA, 15 bp, Homo sapiens
ctctaaaatataaaa

SEQ ID NO: 1910483 - DNA, 15 bp, Homo sapiens
tctaaaatataaaaa

SEQ ID NO: 1910484 - DNA, 15 bp, Homo sapiens
ctaaaatataaaaat

SEQ ID NO: 1910485 - DNA, 15 bp, Homo sapiens
tataaaaattagctg

SEQ ID NO: 1910486 - DNA, 15 bp, Homo sapiens
ataaaaattagctgg

SEQ ID NO: 1910487 - DNA, 15 bp, Homo sapiens
taaaaattagctggg

SEQ ID NO: 1910488 - DNA, 15 bp, Homo sapiens
ctgggcatggtggcg

SEQ ID NO: 1910489 - DNA, 15 bp, Homo sapiens
tgggcatggtggcgc

SEQ ID NO: 1910490 - DNA, 15 bp, Homo sapiens
gggcatggtggcgca

SEQ ID NO: 1910491 - DNA, 15 bp, Homo sapiens
gcatggtggcgcata

SEQ ID NO: 1910492 - DNA, 15 bp, Homo sapiens
catggtggcgcatac

SEQ ID NO: 1910493 - DNA, 15 bp, Homo sapiens
atggtggcgcatacc

SEQ ID NO: 1910494 - DNA, 15 bp, Homo sapiens
tggtggcgcatacct

SEQ ID NO: 1910495 - DNA, 15 bp, Homo sapiens
ggtggcgcatacctg

SEQ ID NO: 1910496 - DNA, 15 bp, Homo sapiens
gtggcgcatacctgt

SEQ ID NO: 1910497 - DNA, 15 bp, Homo sapiens
tggcgcatacctgta

SEQ ID NO: 1910498 - DNA, 15 bp, Homo sapiens
ggcgcatacctgtaa

SEQ ID NO: 1910499 - DNA, 15 bp, Homo sapiens
gcgcatacctgtaat

SEQ ID NO: 1910500 - DNA, 15 bp, Homo sapiens
cgcatacctgtaatc

SEQ ID NO: 1910501 - DNA, 15 bp, Homo sapiens
gcatacctgtaatcc

SEQ ID NO: 1910502 - DNA, 15 bp, Homo sapiens
ccagctactcaagaa

SEQ ID NO: 1910503 - DNA, 15 bp, Homo sapiens
cagctactcaagaag

SEQ ID NO: 1910504 - DNA, 15 bp, Homo sapiens
agctactcaagaagc

SEQ ID NO: 1910505 - DNA, 15 bp, Homo sapiens
gctactcaagaagct

SEQ ID NO: 1910506 - DNA, 15 bp, Homo sapiens
ctactcaagaagctg

SEQ ID NO: 1910507 - DNA, 15 bp, Homo sapiens
tactcaagaagctga

SEQ ID NO: 1910508 - DNA, 15 bp, Homo sapiens
actcaagaagctgag

SEQ ID NO: 1910509 - DNA, 15 bp, Homo sapiens
ctcaagaagctgagg

SEQ ID NO: 1910510 - DNA, 15 bp, Homo sapiens
tcaagaagctgaggt

SEQ ID NO: 1910511 - DNA, 15 bp, Homo sapiens
caagaagctgaggtg

SEQ ID NO: 1910512 - DNA, 15 bp, Homo sapiens
aagaagctgaggtgg

SEQ ID NO: 1910513 - DNA, 15 bp, Homo sapiens
agaagctgaggtggg

SEQ ID NO: 1910514 - DNA, 15 bp, Homo sapiens
tgagcctgggaggtg

SEQ ID NO: 1910515 - DNA, 15 bp, Homo sapiens
gagcctgggaggtgg

SEQ ID NO: 1910516 - DNA, 15 bp, Homo sapiens
agcctgggaggtgga

SEQ ID NO: 1910517 - DNA, 15 bp, Homo sapiens
gcctgggaggtggag

SEQ ID NO: 1910518 - DNA, 15 bp, Homo sapiens
agtgagcagagatcg

SEQ ID NO: 1910519 - DNA, 15 bp, Homo sapiens
gtgagcagagatcgt

SEQ ID NO: 1910520 - DNA, 15 bp, Homo sapiens
tgagcagagatcgtg

SEQ ID NO: 1910521 - DNA, 15 bp, Homo sapiens
gagcagagatcgtgc

SEQ ID NO: 1910522 - DNA, 15 bp, Homo sapiens
agcagagatcgtgcc

SEQ ID NO: 1910523 - DNA, 15 bp, Homo sapiens
gcagagatcgtgcca

SEQ ID NO: 1910524 - DNA, 15 bp, Homo sapiens
cagagatcgtgccac

SEQ ID NO: 1910525 - DNA, 15 bp, Homo sapiens
agagatcgtgccact

SEQ ID NO: 1910526 - DNA, 15 bp, Homo sapiens
ctccatctcaaataa

SEQ ID NO: 1910527 - DNA, 15 bp, Homo sapiens
ccatctcaaataaac

SEQ ID NO: 1910528 - DNA, 15 bp, Homo sapiens
catctcaaataaaca

SEQ ID NO: 1910529 - DNA, 15 bp, Homo sapiens
atctcaaataaacaa

SEQ ID NO: 1910530 - DNA, 15 bp, Homo sapiens
tctcaaataaacaaa

SEQ ID NO: 1910531 - DNA, 15 bp, Homo sapiens
ctcaaataaacaaaa

SEQ ID NO: 1910532 - DNA, 15 bp, Homo sapiens
tcaaataaacaaaac

SEQ ID NO: 1910533 - DNA, 15 bp, Homo sapiens
caaataaacaaaact

SEQ ID NO: 1910534 - DNA, 15 bp, Homo sapiens
aaataaacaaaacta

SEQ ID NO: 1910535 - DNA, 15 bp, Homo sapiens
aataaacaaaactaa

SEQ ID NO: 1910536 - DNA, 15 bp, Homo sapiens
ataaacaaaactaaa

SEQ ID NO: 1910537 - DNA, 15 bp, Homo sapiens
taaacaaaactaaac

SEQ ID NO: 1910538 - DNA, 15 bp, Homo sapiens
aaacaaaactaaact

SEQ ID NO: 1910539 - DNA, 15 bp, Homo sapiens
aacaaaactaaacta

SEQ ID NO: 1910540 - DNA, 15 bp, Homo sapiens
acaaaactaaactaa

SEQ ID NO: 1910541 - DNA, 15 bp, Homo sapiens
caaaactaaactaaa

SEQ ID NO: 1910542 - DNA, 15 bp, Homo sapiens
aaactaaactaaaaa

SEQ ID NO: 1910543 - DNA, 15 bp, Homo sapiens
aactaaactaaaaag

SEQ ID NO: 1910544 - DNA, 15 bp, Homo sapiens
actaaactaaaaaga

SEQ ID NO: 1910545 - DNA, 15 bp, Homo sapiens
ctaaactaaaaagaa

SEQ ID NO: 1910546 - DNA, 15 bp, Homo sapiens
taaactaaaaagaaa

SEQ ID NO: 1910547 - DNA, 15 bp, Homo sapiens
aaactaaaaagaaaa

SEQ ID NO: 1910548 - DNA, 15 bp, Homo sapiens
aactaaaaagaaaaa

SEQ ID NO: 1910549 - DNA, 15 bp, Homo sapiens
actaaaaagaaaaag

SEQ ID NO: 1910550 - DNA, 15 bp, Homo sapiens
ctaaaaagaaaaagt

SEQ ID NO: 1910551 - DNA, 15 bp, Homo sapiens
taaaaagaaaaagtt

SEQ ID NO: 1910552 - DNA, 15 bp, Homo sapiens
aaaaagaaaaagttg

SEQ ID NO: 1910553 - DNA, 15 bp, Homo sapiens
aaaagaaaaagttga

SEQ ID NO: 1910554 - DNA, 15 bp, Homo sapiens
aaagaaaaagttgag

SEQ ID NO: 1910555 - DNA, 15 bp, Homo sapiens
aagaaaaagttgaga

SEQ ID NO: 1910556 - DNA, 15 bp, Homo sapiens
agaaaaagttgagac

SEQ ID NO: 1910557 - DNA, 15 bp, Homo sapiens
gaaaaagttgagacc

SEQ ID NO: 1910558 - DNA, 15 bp, Homo sapiens
aaaaagttgagacct

SEQ ID NO: 1910559 - DNA, 15 bp, Homo sapiens
aaaagttgagacctt

SEQ ID NO: 1910560 - DNA, 15 bp, Homo sapiens
aaagttgagaccttt

SEQ ID NO: 1910561 - DNA, 15 bp, Homo sapiens
aagttgagacctttt

SEQ ID NO: 1910562 - DNA, 15 bp, Homo sapiens
agttgagaccttttt

SEQ ID NO: 1910563 - DNA, 15 bp, Homo sapiens
gttgagacctttttt

SEQ ID NO: 1910564 - DNA, 15 bp, Homo sapiens
ttgagaccttttttt

SEQ ID NO: 1910565 - DNA, 15 bp, Homo sapiens
tgagaccttttttta

SEQ ID NO: 1910566 - DNA, 15 bp, Homo sapiens
gagacctttttttat

SEQ ID NO: 1910567 - DNA, 15 bp, Homo sapiens
agacctttttttatt

SEQ ID NO: 1910568 - DNA, 15 bp, Homo sapiens
gacctttttttattc

SEQ ID NO: 1910569 - DNA, 15 bp, Homo sapiens
acctttttttattct

SEQ ID NO: 1910570 - DNA, 15 bp, Homo sapiens
cctttttttattctt

SEQ ID NO: 1910571 - DNA, 15 bp, Homo sapiens
ctttttttattcttt

SEQ ID NO: 1910572 - DNA, 15 bp, Homo sapiens
tttttttattctttt

SEQ ID NO: 1910573 - DNA, 15 bp, Homo sapiens
ttttttattcttttt

SEQ ID NO: 1910574 - DNA, 15 bp, Homo sapiens
tttttattctttttt

SEQ ID NO: 1910575 - DNA, 15 bp, Homo sapiens
ttttattcttttttt

SEQ ID NO: 1910576 - DNA, 15 bp, Homo sapiens
tttattctttttttt

SEQ ID NO: 1910577 - DNA, 15 bp, Homo sapiens
ttattcttttttttc

SEQ ID NO: 1910578 - DNA, 15 bp, Homo sapiens
tattcttttttttca

SEQ ID NO: 1910579 - DNA, 15 bp, Homo sapiens
attcttttttttcat

SEQ ID NO: 1910580 - DNA, 15 bp, Homo sapiens
ttcttttttttcata

SEQ ID NO: 1910581 - DNA, 15 bp, Homo sapiens
tcttttttttcatac

SEQ ID NO: 1910582 - DNA, 15 bp, Homo sapiens
cttttttttcatact

SEQ ID NO: 1910583 - DNA, 15 bp, Homo sapiens
ttttttttcatacta

SEQ ID NO: 1910584 - DNA, 15 bp, Homo sapiens
tttttttcatactaa

SEQ ID NO: 1910585 - DNA, 15 bp, Homo sapiens
ttttttcatactaag

SEQ ID NO: 1910586 - DNA, 15 bp, Homo sapiens
tttttcatactaagc

SEQ ID NO: 1910587 - DNA, 15 bp, Homo sapiens
ttttcatactaagcc

SEQ ID NO: 1910588 - DNA, 15 bp, Homo sapiens
tttcatactaagcct

SEQ ID NO: 1910589 - DNA, 15 bp, Homo sapiens
ttcatactaagcctt

SEQ ID NO: 1910590 - DNA, 15 bp, Homo sapiens
tcatactaagccttt

SEQ ID NO: 1910591 - DNA, 15 bp, Homo sapiens
catactaagccttta

SEQ ID NO: 1910592 - DNA, 15 bp, Homo sapiens
atactaagcctttaa

SEQ ID NO: 1910593 - DNA, 15 bp, Homo sapiens
tactaagcctttaaa

SEQ ID NO: 1910594 - DNA, 15 bp, Homo sapiens
actaagcctttaaaa

SEQ ID NO: 1910595 - DNA, 15 bp, Homo sapiens
ctaagcctttaaaat

SEQ ID NO: 1910596 - DNA, 15 bp, Homo sapiens
taagcctttaaaatc

SEQ ID NO: 1910597 - DNA, 15 bp, Homo sapiens
aagcctttaaaatcc

SEQ ID NO: 1910598 - DNA, 15 bp, Homo sapiens
agcctttaaaatcca

SEQ ID NO: 1910599 - DNA, 15 bp, Homo sapiens
gcctttaaaatccag

SEQ ID NO: 1910600 - DNA, 15 bp, Homo sapiens
cctttaaaatccagt

SEQ ID NO: 1910601 - DNA, 15 bp, Homo sapiens
ctttaaaatccagtg

SEQ ID NO: 1910602 - DNA, 15 bp, Homo sapiens
tttaaaatccagtgg

SEQ ID NO: 1910603 - DNA, 15 bp, Homo sapiens
ttaaaatccagtggg

SEQ ID NO: 1910604 - DNA, 15 bp, Homo sapiens
taaaatccagtgggc

SEQ ID NO: 1910605 - DNA, 15 bp, Homo sapiens
aaaatccagtgggct

SEQ ID NO: 1910606 - DNA, 15 bp, Homo sapiens
aaatccagtgggctt

SEQ ID NO: 1910607 - DNA, 15 bp, Homo sapiens
aatccagtgggcttt

SEQ ID NO: 1910608 - DNA, 15 bp, Homo sapiens
atccagtgggctttt

SEQ ID NO: 1910609 - DNA, 15 bp, Homo sapiens
tccagtgggcttttg

SEQ ID NO: 1910610 - DNA, 15 bp, Homo sapiens
ccagtgggcttttga

SEQ ID NO: 1910611 - DNA, 15 bp, Homo sapiens
cagtgggcttttgac

SEQ ID NO: 1910612 - DNA, 15 bp, Homo sapiens
agtgggcttttgaca

SEQ ID NO: 1910613 - DNA, 15 bp, Homo sapiens
gtgggcttttgacag

SEQ ID NO: 1910614 - DNA, 15 bp, Homo sapiens
tgggcttttgacagc

SEQ ID NO: 1910615 - DNA, 15 bp, Homo sapiens
gggcttttgacagcc

SEQ ID NO: 1910616 - DNA, 15 bp, Homo sapiens
ggcttttgacagcca

SEQ ID NO: 1910617 - DNA, 15 bp, Homo sapiens
gcttttgacagccac

SEQ ID NO: 1910618 - DNA, 15 bp, Homo sapiens
cttttgacagccaca

SEQ ID NO: 1910619 - DNA, 15 bp, Homo sapiens
ttttgacagccacag

SEQ ID NO: 1910620 - DNA, 15 bp, Homo sapiens
tttgacagccacagc

SEQ ID NO: 1910621 - DNA, 15 bp, Homo sapiens
ttgacagccacagca

SEQ ID NO: 1910622 - DNA, 15 bp, Homo sapiens
tgacagccacagcac

SEQ ID NO: 1910623 - DNA, 15 bp, Homo sapiens
gacagccacagcaca

SEQ ID NO: 1910624 - DNA, 15 bp, Homo sapiens
acagccacagcacag

SEQ ID NO: 1910625 - DNA, 15 bp, Homo sapiens
cagccacagcacagc

SEQ ID NO: 1910626 - DNA, 15 bp, Homo sapiens
agccacagcacagct

SEQ ID NO: 1910627 - DNA, 15 bp, Homo sapiens
gccacagcacagctc

SEQ ID NO: 1910628 - DNA, 15 bp, Homo sapiens
ccacagcacagctca

SEQ ID NO: 1910629 - DNA, 15 bp, Homo sapiens
cacagcacagctcag

SEQ ID NO: 1910630 - DNA, 15 bp, Homo sapiens
acagcacagctcagt

SEQ ID NO: 1910631 - DNA, 15 bp, Homo sapiens
cagcacagctcagtt

SEQ ID NO: 1910632 - DNA, 15 bp, Homo sapiens
agcacagctcagttt

SEQ ID NO: 1910633 - DNA, 15 bp, Homo sapiens
gcacagctcagtttg

SEQ ID NO: 1910634 - DNA, 15 bp, Homo sapiens
cacagctcagtttgg

SEQ ID NO: 1910635 - DNA, 15 bp, Homo sapiens
acagctcagtttgga

SEQ ID NO: 1910636 - DNA, 15 bp, Homo sapiens
cagctcagtttggac

SEQ ID NO: 1910637 - DNA, 15 bp, Homo sapiens
agctcagtttggaca

SEQ ID NO: 1910638 - DNA, 15 bp, Homo sapiens
gctcagtttggacaa

SEQ ID NO: 1910639 - DNA, 15 bp, Homo sapiens
ctcagtttggacaaa

SEQ ID NO: 1910640 - DNA, 15 bp, Homo sapiens
tcagtttggacaaac

SEQ ID NO: 1910641 - DNA, 15 bp, Homo sapiens
cagtttggacaaacc

SEQ ID NO: 1910642 - DNA, 15 bp, Homo sapiens
agtttggacaaacca

SEQ ID NO: 1910643 - DNA, 15 bp, Homo sapiens
gtttggacaaaccaa

SEQ ID NO: 1910644 - DNA, 15 bp, Homo sapiens
tttggacaaaccaaa

SEQ ID NO: 1910645 - DNA, 15 bp, Homo sapiens
ttggacaaaccaaat

SEQ ID NO: 1910646 - DNA, 15 bp, Homo sapiens
tggacaaaccaaatc

SEQ ID NO: 1910647 - DNA, 15 bp, Homo sapiens
ggacaaaccaaatct

SEQ ID NO: 1910648 - DNA, 15 bp, Homo sapiens
gacaaaccaaatctc

SEQ ID NO: 1910649 - DNA, 15 bp, Homo sapiens
acaaaccaaatctca

SEQ ID NO: 1910650 - DNA, 15 bp, Homo sapiens
caaaccaaatctcaa

SEQ ID NO: 1910651 - DNA, 15 bp, Homo sapiens
aaaccaaatctcaaa

SEQ ID NO: 1910652 - DNA, 15 bp, Homo sapiens
aaccaaatctcaaat

SEQ ID NO: 1910653 - DNA, 15 bp, Homo sapiens
accaaatctcaaatg

SEQ ID NO: 1910654 - DNA, 15 bp, Homo sapiens
ccaaatctcaaatgc

SEQ ID NO: 1910655 - DNA, 15 bp, Homo sapiens
caaatctcaaatgct

SEQ ID NO: 1910656 - DNA, 15 bp, Homo sapiens
aaatctcaaatgctt

SEQ ID NO: 1910657 - DNA, 15 bp, Homo sapiens
aatctcaaatgcttg

SEQ ID NO: 1910658 - DNA, 15 bp, Homo sapiens
atctcaaatgcttgg

SEQ ID NO: 1910659 - DNA, 15 bp, Homo sapiens
tctcaaatgcttggt

SEQ ID NO: 1910660 - DNA, 15 bp, Homo sapiens
ctcaaatgcttggtg

SEQ ID NO: 1910661 - DNA, 15 bp, Homo sapiens
tcaaatgcttggtgg

SEQ ID NO: 1910662 - DNA, 15 bp, Homo sapiens
caaatgcttggtggc

SEQ ID NO: 1910663 - DNA, 15 bp, Homo sapiens
aaatgcttggtggcc

SEQ ID NO: 1910664 - DNA, 15 bp, Homo sapiens
aatgcttggtggcca

SEQ ID NO: 1910665 - DNA, 15 bp, Homo sapiens
atgcttggtggccac

SEQ ID NO: 1910666 - DNA, 15 bp, Homo sapiens
tgcttggtggccacg

SEQ ID NO: 1910667 - DNA, 15 bp, Homo sapiens
gcttggtggccacgt

SEQ ID NO: 1910668 - DNA, 15 bp, Homo sapiens
cttggtggccacgtg

SEQ ID NO: 1910669 - DNA, 15 bp, Homo sapiens
ttggtggccacgtgt

SEQ ID NO: 1910670 - DNA, 15 bp, Homo sapiens
tggtggccacgtgtg

SEQ ID NO: 1910671 - DNA, 15 bp, Homo sapiens
ggtggccacgtgtgt

SEQ ID NO: 1910672 - DNA, 15 bp, Homo sapiens
gtggccacgtgtgtc

SEQ ID NO: 1910673 - DNA, 15 bp, Homo sapiens
tggccacgtgtgtct

SEQ ID NO: 1910674 - DNA, 15 bp, Homo sapiens
ggccacgtgtgtctc

SEQ ID NO: 1910675 - DNA, 15 bp, Homo sapiens
gccacgtgtgtctcg

SEQ ID NO: 1910676 - DNA, 15 bp, Homo sapiens
ccacgtgtgtctcgg

SEQ ID NO: 1910677 - DNA, 15 bp, Homo sapiens
cacgtgtgtctcggg

SEQ ID NO: 1910678 - DNA, 15 bp, Homo sapiens
acgtgtgtctcgggg

SEQ ID NO: 1910679 - DNA, 15 bp, Homo sapiens
cgtgtgtctcggggc

SEQ ID NO: 1910680 - DNA, 15 bp, Homo sapiens
gtgtgtctcggggct

SEQ ID NO: 1910681 - DNA, 15 bp, Homo sapiens
tgtgtctcggggctc

SEQ ID NO: 1910682 - DNA, 15 bp, Homo sapiens
gtgtctcggggctcc

SEQ ID NO: 1910683 - DNA, 15 bp, Homo sapiens
tgtctcggggctcct

SEQ ID NO: 1910684 - DNA, 15 bp, Homo sapiens
gtctcggggctcctg

SEQ ID NO: 1910685 - DNA, 15 bp, Homo sapiens
tctcggggctcctga

SEQ ID NO: 1910686 - DNA, 15 bp, Homo sapiens
ctcggggctcctgaa

SEQ ID NO: 1910687 - DNA, 15 bp, Homo sapiens
tcggggctcctgaat

SEQ ID NO: 1910688 - DNA, 15 bp, Homo sapiens
cggggctcctgaatt

SEQ ID NO: 1910689 - DNA, 15 bp, Homo sapiens
ggggctcctgaatta

SEQ ID NO: 1910690 - DNA, 15 bp, Homo sapiens
gggctcctgaattaa

SEQ ID NO: 1910691 - DNA, 15 bp, Homo sapiens
ggctcctgaattaaa

SEQ ID NO: 1910692 - DNA, 15 bp, Homo sapiens
gctcctgaattaaac

SEQ ID NO: 1910693 - DNA, 15 bp, Homo sapiens
ctcctgaattaaaca

SEQ ID NO: 1910694 - DNA, 15 bp, Homo sapiens
tcctgaattaaacag

SEQ ID NO: 1910695 - DNA, 15 bp, Homo sapiens
cctgaattaaacagt

SEQ ID NO: 1910696 - DNA, 15 bp, Homo sapiens
ctgaattaaacagta

SEQ ID NO: 1910697 - DNA, 15 bp, Homo sapiens
tgaattaaacagtag

SEQ ID NO: 1910698 - DNA, 15 bp, Homo sapiens
gaattaaacagtaga

SEQ ID NO: 1910699 - DNA, 15 bp, Homo sapiens
aattaaacagtagat

SEQ ID NO: 1910700 - DNA, 15 bp, Homo sapiens
attaaacagtagatc

SEQ ID NO: 1910701 - DNA, 15 bp, Homo sapiens
ttaaacagtagatca

SEQ ID NO: 1910702 - DNA, 15 bp, Homo sapiens
taaacagtagatcaa

SEQ ID NO: 1910703 - DNA, 15 bp, Homo sapiens
aaacagtagatcaag

SEQ ID NO: 1910704 - DNA, 15 bp, Homo sapiens
aacagtagatcaagg

SEQ ID NO: 1910705 - DNA, 15 bp, Homo sapiens
acagtagatcaaggg

SEQ ID NO: 1910706 - DNA, 15 bp, Homo sapiens
cagtagatcaagggc

SEQ ID NO: 1910707 - DNA, 15 bp, Homo sapiens
agtagatcaagggca

SEQ ID NO: 1910708 - DNA, 15 bp, Homo sapiens
gtagatcaagggcag

SEQ ID NO: 1910709 - DNA, 15 bp, Homo sapiens
tagatcaagggcaga

SEQ ID NO: 1910710 - DNA, 15 bp, Homo sapiens
agatcaagggcagaa

SEQ ID NO: 1910711 - DNA, 15 bp, Homo sapiens
gatcaagggcagaag

SEQ ID NO: 1910712 - DNA, 15 bp, Homo sapiens
atcaagggcagaaga

SEQ ID NO: 1910713 - DNA, 15 bp, Homo sapiens
tcaagggcagaagat

SEQ ID NO: 1910714 - DNA, 15 bp, Homo sapiens
caagggcagaagatc

SEQ ID NO: 1910715 - DNA, 15 bp, Homo sapiens
aagggcagaagatct

SEQ ID NO: 1910716 - DNA, 15 bp, Homo sapiens
agggcagaagatctc

SEQ ID NO: 1910717 - DNA, 15 bp, Homo sapiens
gggcagaagatctca

SEQ ID NO: 1910718 - DNA, 15 bp, Homo sapiens
ggcagaagatctcag

SEQ ID NO: 1910719 - DNA, 15 bp, Homo sapiens
gcagaagatctcagg

SEQ ID NO: 1910720 - DNA, 15 bp, Homo sapiens
cagaagatctcagga

SEQ ID NO: 1910721 - DNA, 15 bp, Homo sapiens
agaagatctcaggac

SEQ ID NO: 1910722 - DNA, 15 bp, Homo sapiens
gaagatctcaggaca

SEQ ID NO: 1910723 - DNA, 15 bp, Homo sapiens
aagatctcaggacag

SEQ ID NO: 1910724 - DNA, 15 bp, Homo sapiens
agatctcaggacagc

SEQ ID NO: 1910725 - DNA, 15 bp, Homo sapiens
gatctcaggacagcc

SEQ ID NO: 1910726 - DNA, 15 bp, Homo sapiens
atctcaggacagcct

SEQ ID NO: 1910727 - DNA, 15 bp, Homo sapiens
tctcaggacagcctt

SEQ ID NO: 1910728 - DNA, 15 bp, Homo sapiens
ctcaggacagcctta

SEQ ID NO: 1910729 - DNA, 15 bp, Homo sapiens
tcaggacagccttag

SEQ ID NO: 1910730 - DNA, 15 bp, Homo sapiens
caggacagccttaga

SEQ ID NO: 1910731 - DNA, 15 bp, Homo sapiens
aggacagccttagag

SEQ ID NO: 1910732 - DNA, 15 bp, Homo sapiens
ggacagccttagagc

SEQ ID NO: 1910733 - DNA, 15 bp, Homo sapiens
gacagccttagagct

SEQ ID NO: 1910734 - DNA, 15 bp, Homo sapiens
acagccttagagctt

SEQ ID NO: 1910735 - DNA, 15 bp, Homo sapiens
cagccttagagcttc

SEQ ID NO: 1910736 - DNA, 15 bp, Homo sapiens
agccttagagcttct

SEQ ID NO: 1910737 - DNA, 15 bp, Homo sapiens
gccttagagcttctg

SEQ ID NO: 1910738 - DNA, 15 bp, Homo sapiens
ccttagagcttctgt

SEQ ID NO: 1910739 - DNA, 15 bp, Homo sapiens
cttagagcttctgta

SEQ ID NO: 1910740 - DNA, 15 bp, Homo sapiens
ttagagcttctgtaa

SEQ ID NO: 1910741 - DNA, 15 bp, Homo sapiens
tagagcttctgtaaa

SEQ ID NO: 1910742 - DNA, 15 bp, Homo sapiens
agagcttctgtaaac

SEQ ID NO: 1910743 - DNA, 15 bp, Homo sapiens
gagcttctgtaaaca

SEQ ID NO: 1910744 - DNA, 15 bp, Homo sapiens
agcttctgtaaacat

SEQ ID NO: 1910745 - DNA, 15 bp, Homo sapiens
gcttctgtaaacatg

SEQ ID NO: 1910746 - DNA, 15 bp, Homo sapiens
cttctgtaaacatgg

SEQ ID NO: 1910747 - DNA, 15 bp, Homo sapiens
ttctgtaaacatgga

SEQ ID NO: 1910748 - DNA, 15 bp, Homo sapiens
tctgtaaacatggag

SEQ ID NO: 1910749 - DNA, 15 bp, Homo sapiens
ctgtaaacatggagc

SEQ ID NO: 1910750 - DNA, 15 bp, Homo sapiens
tgtaaacatggagct

SEQ ID NO: 1910751 - DNA, 15 bp, Homo sapiens
gtaaacatggagctc

SEQ ID NO: 1910752 - DNA, 15 bp, Homo sapiens
taaacatggagctct

SEQ ID NO: 1910753 - DNA, 15 bp, Homo sapiens
aaacatggagctctg

SEQ ID NO: 1910754 - DNA, 15 bp, Homo sapiens
aacatggagctctgg

SEQ ID NO: 1910755 - DNA, 15 bp, Homo sapiens
acatggagctctggg

SEQ ID NO: 1910756 - DNA, 15 bp, Homo sapiens
catggagctctggga

SEQ ID NO: 1910757 - DNA, 15 bp, Homo sapiens
atggagctctgggaa

SEQ ID NO: 1910758 - DNA, 15 bp, Homo sapiens
tggagctctgggaat

SEQ ID NO: 1910759 - DNA, 15 bp, Homo sapiens
ggagctctgggaatc

SEQ ID NO: 1910760 - DNA, 15 bp, Homo sapiens
gagctctgggaatca

SEQ ID NO: 1910761 - DNA, 15 bp, Homo sapiens
agctctgggaatcag

SEQ ID NO: 1910762 - DNA, 15 bp, Homo sapiens
gctctgggaatcagt

SEQ ID NO: 1910763 - DNA, 15 bp, Homo sapiens
ctctgggaatcagtt

SEQ ID NO: 1910764 - DNA, 15 bp, Homo sapiens
tctgggaatcagtta

SEQ ID NO: 1910765 - DNA, 15 bp, Homo sapiens
ctgggaatcagttaa

SEQ ID NO: 1910766 - DNA, 15 bp, Homo sapiens
tgggaatcagttaag

SEQ ID NO: 1910767 - DNA, 15 bp, Homo sapiens
gggaatcagttaagg

SEQ ID NO: 1910768 - DNA, 15 bp, Homo sapiens
ggaatcagttaaggt

SEQ ID NO: 1910769 - DNA, 15 bp, Homo sapiens
gaatcagttaaggtg

SEQ ID NO: 1910770 - DNA, 15 bp, Homo sapiens
aatcagttaaggtgg

SEQ ID NO: 1910771 - DNA, 15 bp, Homo sapiens
atcagttaaggtggg

SEQ ID NO: 1910772 - DNA, 15 bp, Homo sapiens
tcagttaaggtggga

SEQ ID NO: 1910773 - DNA, 15 bp, Homo sapiens
cagttaaggtgggaa

SEQ ID NO: 1910774 - DNA, 15 bp, Homo sapiens
agttaaggtgggaat

SEQ ID NO: 1910775 - DNA, 15 bp, Homo sapiens
gttaaggtgggaatg

SEQ ID NO: 1910776 - DNA, 15 bp, Homo sapiens
ttaaggtgggaatga

SEQ ID NO: 1910777 - DNA, 15 bp, Homo sapiens
taaggtgggaatgag

SEQ ID NO: 1910778 - DNA, 15 bp, Homo sapiens
aaggtgggaatgaga

SEQ ID NO: 1910779 - DNA, 15 bp, Homo sapiens
aggtgggaatgagaa

SEQ ID NO: 1910780 - DNA, 15 bp, Homo sapiens
ggtgggaatgagaaa

SEQ ID NO: 1910781 - DNA, 15 bp, Homo sapiens
gtgggaatgagaaag

SEQ ID NO: 1910782 - DNA, 15 bp, Homo sapiens
tgggaatgagaaagg

SEQ ID NO: 1910783 - DNA, 15 bp, Homo sapiens
gggaatgagaaagga

SEQ ID NO: 1910784 - DNA, 15 bp, Homo sapiens
ggaatgagaaaggac

SEQ ID NO: 1910785 - DNA, 15 bp, Homo sapiens
gaatgagaaaggacc

SEQ ID NO: 1910786 - DNA, 15 bp, Homo sapiens
aatgagaaaggaccc

SEQ ID NO: 1910787 - DNA, 15 bp, Homo sapiens
atgagaaaggaccct

SEQ ID NO: 1910788 - DNA, 15 bp, Homo sapiens
tgagaaaggaccctt

SEQ ID NO: 1910789 - DNA, 15 bp, Homo sapiens
gagaaaggacccttc

SEQ ID NO: 1910790 - DNA, 15 bp, Homo sapiens
agaaaggacccttcc

SEQ ID NO: 1910791 - DNA, 15 bp, Homo sapiens
gaaaggacccttccc

SEQ ID NO: 1910792 - DNA, 15 bp, Homo sapiens
aaaggacccttcccg

SEQ ID NO: 1910793 - DNA, 15 bp, Homo sapiens
aaggacccttcccga

SEQ ID NO: 1910794 - DNA, 15 bp, Homo sapiens
aggacccttcccgag

SEQ ID NO: 1910795 - DNA, 15 bp, Homo sapiens
ggacccttcccgagg

SEQ ID NO: 1910796 - DNA, 15 bp, Homo sapiens
gacccttcccgaggc

SEQ ID NO: 1910797 - DNA, 15 bp, Homo sapiens
acccttcccgaggca

SEQ ID NO: 1910798 - DNA, 15 bp, Homo sapiens
cccttcccgaggcag

SEQ ID NO: 1910799 - DNA, 15 bp, Homo sapiens
ccttcccgaggcagg

SEQ ID NO: 1910800 - DNA, 15 bp, Homo sapiens
cttcccgaggcaggg

SEQ ID NO: 1910801 - DNA, 15 bp, Homo sapiens
ttcccgaggcagggt

SEQ ID NO: 1910802 - DNA, 15 bp, Homo sapiens
tcccgaggcagggtc

SEQ ID NO: 1910803 - DNA, 15 bp, Homo sapiens
cccgaggcagggtcc

SEQ ID NO: 1910804 - DNA, 15 bp, Homo sapiens
ccgaggcagggtcct

SEQ ID NO: 1910805 - DNA, 15 bp, Homo sapiens
cgaggcagggtcctc

SEQ ID NO: 1910806 - DNA, 15 bp, Homo sapiens
gaggcagggtcctcc

SEQ ID NO: 1910807 - DNA, 15 bp, Homo sapiens
aggcagggtcctcca

SEQ ID NO: 1910808 - DNA, 15 bp, Homo sapiens
ggcagggtcctccag

SEQ ID NO: 1910809 - DNA, 15 bp, Homo sapiens
gcagggtcctccagg

SEQ ID NO: 1910810 - DNA, 15 bp, Homo sapiens
cagggtcctccaggg

SEQ ID NO: 1910811 - DNA, 15 bp, Homo sapiens
agggtcctccaggga

SEQ ID NO: 1910812 - DNA, 15 bp, Homo sapiens
gggtcctccagggag

SEQ ID NO: 1910813 - DNA, 15 bp, Homo sapiens
ggtcctccagggagg

SEQ ID NO: 1910814 - DNA, 15 bp, Homo sapiens
gtcctccagggagga

SEQ ID NO: 1910815 - DNA, 15 bp, Homo sapiens
tcctccagggaggag

SEQ ID NO: 1910816 - DNA, 15 bp, Homo sapiens
cctccagggaggagg

SEQ ID NO: 1910817 - DNA, 15 bp, Homo sapiens
ctccagggaggaggg

SEQ ID NO: 1910818 - DNA, 15 bp, Homo sapiens
tccagggaggagggt

SEQ ID NO: 1910819 - DNA, 15 bp, Homo sapiens
ccagggaggagggta

SEQ ID NO: 1910820 - DNA, 15 bp, Homo sapiens
cagggaggagggtaa

SEQ ID NO: 1910821 - DNA, 15 bp, Homo sapiens
agggaggagggtaaa

SEQ ID NO: 1910822 - DNA, 15 bp, Homo sapiens
gggaggagggtaaat

SEQ ID NO: 1910823 - DNA, 15 bp, Homo sapiens
ggaggagggtaaatc

SEQ ID NO: 1910824 - DNA, 15 bp, Homo sapiens
gaggagggtaaatct

SEQ ID NO: 1910825 - DNA, 15 bp, Homo sapiens
aggagggtaaatctg

SEQ ID NO: 1910826 - DNA, 15 bp, Homo sapiens
ggagggtaaatctgg

SEQ ID NO: 1910827 - DNA, 15 bp, Homo sapiens
gagggtaaatctggc

SEQ ID NO: 1910828 - DNA, 15 bp, Homo sapiens
agggtaaatctggct

SEQ ID NO: 1910829 - DNA, 15 bp, Homo sapiens
gggtaaatctggctt

SEQ ID NO: 1910830 - DNA, 15 bp, Homo sapiens
ggtaaatctggcttt

SEQ ID NO: 1910831 - DNA, 15 bp, Homo sapiens
gtaaatctggctttt

SEQ ID NO: 1910832 - DNA, 15 bp, Homo sapiens
taaatctggcttttc

SEQ ID NO: 1910833 - DNA, 15 bp, Homo sapiens
aaatctggcttttct

SEQ ID NO: 1910834 - DNA, 15 bp, Homo sapiens
aatctggcttttctg

SEQ ID NO: 1910835 - DNA, 15 bp, Homo sapiens
atctggcttttctga

SEQ ID NO: 1910836 - DNA, 15 bp, Homo sapiens
tctggcttttctgac

SEQ ID NO: 1910837 - DNA, 15 bp, Homo sapiens
ctggcttttctgacc

SEQ ID NO: 1910838 - DNA, 15 bp, Homo sapiens
tggcttttctgacca

SEQ ID NO: 1910839 - DNA, 15 bp, Homo sapiens
ggcttttctgaccat

SEQ ID NO: 1910840 - DNA, 15 bp, Homo sapiens
gcttttctgaccatc

SEQ ID NO: 1910841 - DNA, 15 bp, Homo sapiens
cttttctgaccatcc

SEQ ID NO: 1910842 - DNA, 15 bp, Homo sapiens
ttttctgaccatccc

SEQ ID NO: 1910843 - DNA, 15 bp, Homo sapiens
tttctgaccatccct

SEQ ID NO: 1910844 - DNA, 15 bp, Homo sapiens
ttctgaccatccctg

SEQ ID NO: 1910845 - DNA, 15 bp, Homo sapiens
tctgaccatccctgg

SEQ ID NO: 1910846 - DNA, 15 bp, Homo sapiens
ctgaccatccctggg

SEQ ID NO: 1910847 - DNA, 15 bp, Homo sapiens
tgaccatccctgggc

SEQ ID NO: 1910848 - DNA, 15 bp, Homo sapiens
gaccatccctgggcc

SEQ ID NO: 1910849 - DNA, 15 bp, Homo sapiens
accatccctgggcct

SEQ ID NO: 1910850 - DNA, 15 bp, Homo sapiens
ccatccctgggcctt

SEQ ID NO: 1910851 - DNA, 15 bp, Homo sapiens
catccctgggcctta

SEQ ID NO: 1910852 - DNA, 15 bp, Homo sapiens
atccctgggccttaa

SEQ ID NO: 1910853 - DNA, 15 bp, Homo sapiens
tccctgggccttaag

SEQ ID NO: 1910854 - DNA, 15 bp, Homo sapiens
ccctgggccttaagg

SEQ ID NO: 1910855 - DNA, 15 bp, Homo sapiens
cctgggccttaaggg

SEQ ID NO: 1910856 - DNA, 15 bp, Homo sapiens
ctgggccttaagggg

SEQ ID NO: 1910857 - DNA, 15 bp, Homo sapiens
tgggccttaaggggc

SEQ ID NO: 1910858 - DNA, 15 bp, Homo sapiens
gggccttaaggggca

SEQ ID NO: 1910859 - DNA, 15 bp, Homo sapiens
ggccttaaggggcag

SEQ ID NO: 1910860 - DNA, 15 bp, Homo sapiens
gccttaaggggcagg

SEQ ID NO: 1910861 - DNA, 15 bp, Homo sapiens
ccttaaggggcagga

SEQ ID NO: 1910862 - DNA, 15 bp, Homo sapiens
cttaaggggcaggag

SEQ ID NO: 1910863 - DNA, 15 bp, Homo sapiens
ttaaggggcaggaga

SEQ ID NO: 1910864 - DNA, 15 bp, Homo sapiens
taaggggcaggagat

SEQ ID NO: 1910865 - DNA, 15 bp, Homo sapiens
aaggggcaggagatt

SEQ ID NO: 1910866 - DNA, 15 bp, Homo sapiens
aggggcaggagattg

SEQ ID NO: 1910867 - DNA, 15 bp, Homo sapiens
ggggcaggagattgg

SEQ ID NO: 1910868 - DNA, 15 bp, Homo sapiens
gggcaggagattgga

SEQ ID NO: 1910869 - DNA, 15 bp, Homo sapiens
ggcaggagattggat

SEQ ID NO: 1910870 - DNA, 15 bp, Homo sapiens
gcaggagattggata

SEQ ID NO: 1910871 - DNA, 15 bp, Homo sapiens
caggagattggatag

SEQ ID NO: 1910872 - DNA, 15 bp, Homo sapiens
aggagattggatagc

SEQ ID NO: 1910873 - DNA, 15 bp, Homo sapiens
ggagattggatagca

SEQ ID NO: 1910874 - DNA, 15 bp, Homo sapiens
gagattggatagcag

SEQ ID NO: 1910875 - DNA, 15 bp, Homo sapiens
agattggatagcagt

SEQ ID NO: 1910876 - DNA, 15 bp, Homo sapiens
gattggatagcagtg

SEQ ID NO: 1910877 - DNA, 15 bp, Homo sapiens
attggatagcagtgg

SEQ ID NO: 1910878 - DNA, 15 bp, Homo sapiens
ttggatagcagtggt

SEQ ID NO: 1910879 - DNA, 15 bp, Homo sapiens
tggatagcagtggta

SEQ ID NO: 1910880 - DNA, 15 bp, Homo sapiens
ggatagcagtggtag

SEQ ID NO: 1910881 - DNA, 15 bp, Homo sapiens
gatagcagtggtagc

SEQ ID NO: 1910882 - DNA, 15 bp, Homo sapiens
atagcagtggtagcc

SEQ ID NO: 1910883 - DNA, 15 bp, Homo sapiens
tagcagtggtagcct

SEQ ID NO: 1910884 - DNA, 15 bp, Homo sapiens
agcagtggtagcctg

SEQ ID NO: 1910885 - DNA, 15 bp, Homo sapiens
gcagtggtagcctgg

SEQ ID NO: 1910886 - DNA, 15 bp, Homo sapiens
cagtggtagcctggg

SEQ ID NO: 1910887 - DNA, 15 bp, Homo sapiens
agtggtagcctgggc

SEQ ID NO: 1910888 - DNA, 15 bp, Homo sapiens
gtggtagcctgggcc

SEQ ID NO: 1910889 - DNA, 15 bp, Homo sapiens
tggtagcctgggccc

SEQ ID NO: 1910890 - DNA, 15 bp, Homo sapiens
ggtagcctgggccct

SEQ ID NO: 1910891 - DNA, 15 bp, Homo sapiens
gtagcctgggccctg

SEQ ID NO: 1910892 - DNA, 15 bp, Homo sapiens
tagcctgggccctgt

SEQ ID NO: 1910893 - DNA, 15 bp, Homo sapiens
agcctgggccctgtc

SEQ ID NO: 1910894 - DNA, 15 bp, Homo sapiens
gcctgggccctgtcc

SEQ ID NO: 1910895 - DNA, 15 bp, Homo sapiens
cctgggccctgtcct

SEQ ID NO: 1910896 - DNA, 15 bp, Homo sapiens
ctgggccctgtcctc

SEQ ID NO: 1910897 - DNA, 15 bp, Homo sapiens
tgggccctgtcctct

SEQ ID NO: 1910898 - DNA, 15 bp, Homo sapiens
gggccctgtcctctg

SEQ ID NO: 1910899 - DNA, 15 bp, Homo sapiens
ggccctgtcctctga

SEQ ID NO: 1910900 - DNA, 15 bp, Homo sapiens
gccctgtcctctgaa

SEQ ID NO: 1910901 - DNA, 15 bp, Homo sapiens
ccctgtcctctgaag

SEQ ID NO: 1910902 - DNA, 15 bp, Homo sapiens
cctgtcctctgaagg

SEQ ID NO: 1910903 - DNA, 15 bp, Homo sapiens
ctgtcctctgaaggg

SEQ ID NO: 1910904 - DNA, 15 bp, Homo sapiens
tgtcctctgaagggc

SEQ ID NO: 1910905 - DNA, 15 bp, Homo sapiens
gtcctctgaagggct

SEQ ID NO: 1910906 - DNA, 15 bp, Homo sapiens
tcctctgaagggctg

SEQ ID NO: 1910907 - DNA, 15 bp, Homo sapiens
cctctgaagggctgg

SEQ ID NO: 1910908 - DNA, 15 bp, Homo sapiens
ctctgaagggctggg

SEQ ID NO: 1910909 - DNA, 15 bp, Homo sapiens
tctgaagggctgggg

SEQ ID NO: 1910910 - DNA, 15 bp, Homo sapiens
ctgaagggctggggg

SEQ ID NO: 1910911 - DNA, 15 bp, Homo sapiens
tgaagggctgggggc

SEQ ID NO: 1910912 - DNA, 15 bp, Homo sapiens
gaagggctgggggcg

SEQ ID NO: 1910913 - DNA, 15 bp, Homo sapiens
aagggctgggggcgt

SEQ ID NO: 1910914 - DNA, 15 bp, Homo sapiens
agggctgggggcgtg

SEQ ID NO: 1910915 - DNA, 15 bp, Homo sapiens
gggctgggggcgtgg

SEQ ID NO: 1910916 - DNA, 15 bp, Homo sapiens
ggctgggggcgtggc

SEQ ID NO: 1910917 - DNA, 15 bp, Homo sapiens
gctgggggcgtggcc

SEQ ID NO: 1910918 - DNA, 15 bp, Homo sapiens
ctgggggcgtggcct

SEQ ID NO: 1910919 - DNA, 15 bp, Homo sapiens
tgggggcgtggcctg

SEQ ID NO: 1910920 - DNA, 15 bp, Homo sapiens
gggggcgtggcctgc

SEQ ID NO: 1910921 - DNA, 15 bp, Homo sapiens
ggggcgtggcctgcc

SEQ ID NO: 1910922 - DNA, 15 bp, Homo sapiens
gggcgtggcctgcca

SEQ ID NO: 1910923 - DNA, 15 bp, Homo sapiens
ggcgtggcctgccag

SEQ ID NO: 1910924 - DNA, 15 bp, Homo sapiens
gcgtggcctgccagt

SEQ ID NO: 1910925 - DNA, 15 bp, Homo sapiens
cgtggcctgccagtt

SEQ ID NO: 1910926 - DNA, 15 bp, Homo sapiens
gtggcctgccagttg

SEQ ID NO: 1910927 - DNA, 15 bp, Homo sapiens
tggcctgccagttgc

SEQ ID NO: 1910928 - DNA, 15 bp, Homo sapiens
ggcctgccagttgca

SEQ ID NO: 1910929 - DNA, 15 bp, Homo sapiens
gcctgccagttgcag

SEQ ID NO: 1910930 - DNA, 15 bp, Homo sapiens
cctgccagttgcaga

SEQ ID NO: 1910931 - DNA, 15 bp, Homo sapiens
ctgccagttgcagag

SEQ ID NO: 1910932 - DNA, 15 bp, Homo sapiens
tgccagttgcagagg

SEQ ID NO: 1910933 - DNA, 15 bp, Homo sapiens
gccagttgcagaggg

SEQ ID NO: 1910934 - DNA, 15 bp, Homo sapiens
ccagttgcagagggt

SEQ ID NO: 1910935 - DNA, 15 bp, Homo sapiens
cagttgcagagggtg

SEQ ID NO: 1910936 - DNA, 15 bp, Homo sapiens
agttgcagagggtgg

SEQ ID NO: 1910937 - DNA, 15 bp, Homo sapiens
gttgcagagggtgga

SEQ ID NO: 1910938 - DNA, 15 bp, Homo sapiens
ttgcagagggtggac

SEQ ID NO: 1910939 - DNA, 15 bp, Homo sapiens
tgcagagggtggaca

SEQ ID NO: 1910940 - DNA, 15 bp, Homo sapiens
gcagagggtggacaa

SEQ ID NO: 1910941 - DNA, 15 bp, Homo sapiens
cagagggtggacaac

SEQ ID NO: 1910942 - DNA, 15 bp, Homo sapiens
agagggtggacaact

SEQ ID NO: 1910943 - DNA, 15 bp, Homo sapiens
gagggtggacaactg

SEQ ID NO: 1910944 - DNA, 15 bp, Homo sapiens
agggtggacaactga

SEQ ID NO: 1910945 - DNA, 15 bp, Homo sapiens
gggtggacaactgaa

SEQ ID NO: 1910946 - DNA, 15 bp, Homo sapiens
ggtggacaactgaac

SEQ ID NO: 1910947 - DNA, 15 bp, Homo sapiens
gtggacaactgaact

SEQ ID NO: 1910948 - DNA, 15 bp, Homo sapiens
tggacaactgaacta

SEQ ID NO: 1910949 - DNA, 15 bp, Homo sapiens
ggacaactgaactag

SEQ ID NO: 1910950 - DNA, 15 bp, Homo sapiens
gacaactgaactagt

SEQ ID NO: 1910951 - DNA, 15 bp, Homo sapiens
acaactgaactagtt

SEQ ID NO: 1910952 - DNA, 15 bp, Homo sapiens
caactgaactagttt

SEQ ID NO: 1910953 - DNA, 15 bp, Homo sapiens
aactgaactagtttt

SEQ ID NO: 1910954 - DNA, 15 bp, Homo sapiens
actgaactagttttc

SEQ ID NO: 1910955 - DNA, 15 bp, Homo sapiens
ctgaactagttttcc

SEQ ID NO: 1910956 - DNA, 15 bp, Homo sapiens
tgaactagttttccc

SEQ ID NO: 1910957 - DNA, 15 bp, Homo sapiens
gaactagttttccct

SEQ ID NO: 1910958 - DNA, 15 bp, Homo sapiens
aactagttttccctg

SEQ ID NO: 1910959 - DNA, 15 bp, Homo sapiens
actagttttccctgt

SEQ ID NO: 1910960 - DNA, 15 bp, Homo sapiens
ctagttttccctgtc

SEQ ID NO: 1910961 - DNA, 15 bp, Homo sapiens
tagttttccctgtct

SEQ ID NO: 1910962 - DNA, 15 bp, Homo sapiens
agttttccctgtctg

SEQ ID NO: 1910963 - DNA, 15 bp, Homo sapiens
gttttccctgtctgt

SEQ ID NO: 1910964 - DNA, 15 bp, Homo sapiens
ttttccctgtctgtc

SEQ ID NO: 1910965 - DNA, 15 bp, Homo sapiens
tttccctgtctgtcc

SEQ ID NO: 1910966 - DNA, 15 bp, Homo sapiens
ttccctgtctgtccc

SEQ ID NO: 1910967 - DNA, 15 bp, Homo sapiens
tccctgtctgtccct

SEQ ID NO: 1910968 - DNA, 15 bp, Homo sapiens
ccctgtctgtccctc

SEQ ID NO: 1910969 - DNA, 15 bp, Homo sapiens
cctgtctgtccctcc

SEQ ID NO: 1910970 - DNA, 15 bp, Homo sapiens
ctgtctgtccctcca

SEQ ID NO: 1910971 - DNA, 15 bp, Homo sapiens
tgtctgtccctccag

SEQ ID NO: 1910972 - DNA, 15 bp, Homo sapiens
gtctgtccctccaga

SEQ ID NO: 1910973 - DNA, 15 bp, Homo sapiens
tctgtccctccagag

SEQ ID NO: 1910974 - DNA, 15 bp, Homo sapiens
ctgtccctccagagt

SEQ ID NO: 1910975 - DNA, 15 bp, Homo sapiens
tgtccctccagagtc

SEQ ID NO: 1910976 - DNA, 15 bp, Homo sapiens
gtccctccagagtcc

SEQ ID NO: 1910977 - DNA, 15 bp, Homo sapiens
tccctccagagtccc

SEQ ID NO: 1910978 - DNA, 15 bp, Homo sapiens
ccctccagagtccct

SEQ ID NO: 1910979 - DNA, 15 bp, Homo sapiens
cctccagagtccctc

SEQ ID NO: 1910980 - DNA, 15 bp, Homo sapiens
ctccagagtccctca

SEQ ID NO: 1910981 - DNA, 15 bp, Homo sapiens
tccagagtccctcac

SEQ ID NO: 1910982 - DNA, 15 bp, Homo sapiens
ccagagtccctcacc

SEQ ID NO: 1910983 - DNA, 15 bp, Homo sapiens
cagagtccctcacct

SEQ ID NO: 1910984 - DNA, 15 bp, Homo sapiens
agagtccctcacctt

SEQ ID NO: 1910985 - DNA, 15 bp, Homo sapiens
gagtccctcaccttt

SEQ ID NO: 1910986 - DNA, 15 bp, Homo sapiens
agtccctcacctttg

SEQ ID NO: 1910987 - DNA, 15 bp, Homo sapiens
gtccctcacctttga

SEQ ID NO: 1910988 - DNA, 15 bp, Homo sapiens
tccctcacctttgac

SEQ ID NO: 1910989 - DNA, 15 bp, Homo sapiens
ccctcacctttgaca

SEQ ID NO: 1910990 - DNA, 15 bp, Homo sapiens
cctcacctttgacat

SEQ ID NO: 1910991 - DNA, 15 bp, Homo sapiens
ctcacctttgacatg

SEQ ID NO: 1910992 - DNA, 15 bp, Homo sapiens
tcacctttgacatgg

SEQ ID NO: 1910993 - DNA, 15 bp, Homo sapiens
cacctttgacatgga

SEQ ID NO: 1910994 - DNA, 15 bp, Homo sapiens
acctttgacatggag

SEQ ID NO: 1910995 - DNA, 15 bp, Homo sapiens
cctttgacatggagt

SEQ ID NO: 1910996 - DNA, 15 bp, Homo sapiens
ctttgacatggagtt

SEQ ID NO: 1910997 - DNA, 15 bp, Homo sapiens
tttgacatggagttg

SEQ ID NO: 1910998 - DNA, 15 bp, Homo sapiens
ttgacatggagttga

SEQ ID NO: 1910999 - DNA, 15 bp, Homo sapiens
tgacatggagttgac

SEQ ID NO: 1911000 - DNA, 15 bp, Homo sapiens
gacatggagttgacc

SEQ ID NO: 1911001 - DNA, 15 bp, Homo sapiens
acatggagttgacct

SEQ ID NO: 1911002 - DNA, 15 bp, Homo sapiens
catggagttgacctc

SEQ ID NO: 1911003 - DNA, 15 bp, Homo sapiens
atggagttgacctcg

SEQ ID NO: 1911004 - DNA, 15 bp, Homo sapiens
tggagttgacctcgg

SEQ ID NO: 1911005 - DNA, 15 bp, Homo sapiens
ggagttgacctcgga

SEQ ID NO: 1911006 - DNA, 15 bp, Homo sapiens
gagttgacctcggag

SEQ ID NO: 1911007 - DNA, 15 bp, Homo sapiens
agttgacctcggagt

SEQ ID NO: 1911008 - DNA, 15 bp, Homo sapiens
ttgacctcggagtgc

SEQ ID NO: 1911009 - DNA, 15 bp, Homo sapiens
tgacctcggagtgcg

SEQ ID NO: 1911010 - DNA, 15 bp, Homo sapiens
gacctcggagtgcgc

SEQ ID NO: 1911011 - DNA, 15 bp, Homo sapiens
acctcggagtgcgct

SEQ ID NO: 1911012 - DNA, 15 bp, Homo sapiens
cctcggagtgcgcta

SEQ ID NO: 1911013 - DNA, 15 bp, Homo sapiens
ctcggagtgcgctac

SEQ ID NO: 1911014 - DNA, 15 bp, Homo sapiens
tcggagtgcgctacc

SEQ ID NO: 1911015 - DNA, 15 bp, Homo sapiens
cggagtgcgctacct

SEQ ID NO: 1911016 - DNA, 15 bp, Homo sapiens
ggagtgcgctacctc

SEQ ID NO: 1911017 - DNA, 15 bp, Homo sapiens
gagtgcgctacctcc

SEQ ID NO: 1911018 - DNA, 15 bp, Homo sapiens
agtgcgctacctccc

SEQ ID NO: 1911019 - DNA, 15 bp, Homo sapiens
gtgcgctacctcccc

SEQ ID NO: 1911020 - DNA, 15 bp, Homo sapiens
tgcgctacctccccc

SEQ ID NO: 1911021 - DNA, 15 bp, Homo sapiens
gcgctacctccccca

SEQ ID NO: 1911022 - DNA, 15 bp, Homo sapiens
cgctacctcccccat

SEQ ID NO: 1911023 - DNA, 15 bp, Homo sapiens
gctacctcccccatg

SEQ ID NO: 1911024 - DNA, 15 bp, Homo sapiens
ctacctcccccatgt

SEQ ID NO: 1911025 - DNA, 15 bp, Homo sapiens
tacctcccccatgtg

SEQ ID NO: 1911026 - DNA, 15 bp, Homo sapiens
acctcccccatgtga

SEQ ID NO: 1911027 - DNA, 15 bp, Homo sapiens
cctcccccatgtgag

SEQ ID NO: 1911028 - DNA, 15 bp, Homo sapiens
ctcccccatgtgagg

SEQ ID NO: 1911029 - DNA, 15 bp, Homo sapiens
tcccccatgtgagga

SEQ ID NO: 1911030 - DNA, 15 bp, Homo sapiens
cccccatgtgaggag

SEQ ID NO: 1911031 - DNA, 15 bp, Homo sapiens
ccccatgtgaggagc

SEQ ID NO: 1911032 - DNA, 15 bp, Homo sapiens
cccatgtgaggagct

SEQ ID NO: 1911033 - DNA, 15 bp, Homo sapiens
ccatgtgaggagctg

SEQ ID NO: 1911034 - DNA, 15 bp, Homo sapiens
catgtgaggagctga

SEQ ID NO: 1911035 - DNA, 15 bp, Homo sapiens
tgtgaggagctgaga

SEQ ID NO: 1911036 - DNA, 15 bp, Homo sapiens
gtgaggagctgagaa

SEQ ID NO: 1911037 - DNA, 15 bp, Homo sapiens
tgaggagctgagaac

SEQ ID NO: 1911038 - DNA, 15 bp, Homo sapiens
gaggagctgagaacg

SEQ ID NO: 1911039 - DNA, 15 bp, Homo sapiens
aggagctgagaacgg

SEQ ID NO: 1911040 - DNA, 15 bp, Homo sapiens
ggagctgagaacgga

SEQ ID NO: 1911041 - DNA, 15 bp, Homo sapiens
gagctgagaacggaa

SEQ ID NO: 1911042 - DNA, 15 bp, Homo sapiens
agctgagaacggaag

SEQ ID NO: 1911043 - DNA, 15 bp, Homo sapiens
gctgagaacggaagc

SEQ ID NO: 1911044 - DNA, 15 bp, Homo sapiens
ctgagaacggaagct

SEQ ID NO: 1911045 - DNA, 15 bp, Homo sapiens
tgagaacggaagctg

SEQ ID NO: 1911046 - DNA, 15 bp, Homo sapiens
gagaacggaagctgc

SEQ ID NO: 1911047 - DNA, 15 bp, Homo sapiens
agaacggaagctgca

SEQ ID NO: 1911048 - DNA, 15 bp, Homo sapiens
gaacggaagctgcag

SEQ ID NO: 1911049 - DNA, 15 bp, Homo sapiens
aacggaagctgcaga

SEQ ID NO: 1911050 - DNA, 15 bp, Homo sapiens
acggaagctgcagaa

SEQ ID NO: 1911051 - DNA, 15 bp, Homo sapiens
cggaagctgcagaaa

SEQ ID NO: 1911052 - DNA, 15 bp, Homo sapiens
ggaagctgcagaaag

SEQ ID NO: 1911053 - DNA, 15 bp, Homo sapiens
gaagctgcagaaaga

SEQ ID NO: 1911054 - DNA, 15 bp, Homo sapiens
aagctgcagaaagat

SEQ ID NO: 1911055 - DNA, 15 bp, Homo sapiens
agctgcagaaagata

SEQ ID NO: 1911056 - DNA, 15 bp, Homo sapiens
gctgcagaaagatac

SEQ ID NO: 1911057 - DNA, 15 bp, Homo sapiens
ctgcagaaagatacg

SEQ ID NO: 1911058 - DNA, 15 bp, Homo sapiens
tgcagaaagatacga

SEQ ID NO: 1911059 - DNA, 15 bp, Homo sapiens
gcagaaagatacgac

SEQ ID NO: 1911060 - DNA, 15 bp, Homo sapiens
cagaaagatacgact

SEQ ID NO: 1911061 - DNA, 15 bp, Homo sapiens
agaaagatacgactg

SEQ ID NO: 1911062 - DNA, 15 bp, Homo sapiens
gaaagatacgactga

SEQ ID NO: 1911063 - DNA, 15 bp, Homo sapiens
aaagatacgactgag

SEQ ID NO: 1911064 - DNA, 15 bp, Homo sapiens
aagatacgactgagg

SEQ ID NO: 1911065 - DNA, 15 bp, Homo sapiens
agatacgactgaggc

SEQ ID NO: 1911066 - DNA, 15 bp, Homo sapiens
gatacgactgaggcg

SEQ ID NO: 1911067 - DNA, 15 bp, Homo sapiens
atacgactgaggcgc

SEQ ID NO: 1911068 - DNA, 15 bp, Homo sapiens
tacgactgaggcgcc

SEQ ID NO: 1911069 - DNA, 15 bp, Homo sapiens
acgactgaggcgcct

SEQ ID NO: 1911070 - DNA, 15 bp, Homo sapiens
cgactgaggcgccta

SEQ ID NO: 1911071 - DNA, 15 bp, Homo sapiens
gactgaggcgcctac

SEQ ID NO: 1911072 - DNA, 15 bp, Homo sapiens
actgaggcgcctacc

SEQ ID NO: 1911073 - DNA, 15 bp, Homo sapiens
ctgaggcgcctacct

SEQ ID NO: 1911074 - DNA, 15 bp, Homo sapiens
tgaggcgcctacctg

SEQ ID NO: 1911075 - DNA, 15 bp, Homo sapiens
gaggcgcctacctgc

SEQ ID NO: 1911076 - DNA, 15 bp, Homo sapiens
aggcgcctacctgca

SEQ ID NO: 1911077 - DNA, 15 bp, Homo sapiens
ggcgcctacctgcat

SEQ ID NO: 1911078 - DNA, 15 bp, Homo sapiens
gcgcctacctgcatt

SEQ ID NO: 1911079 - DNA, 15 bp, Homo sapiens
cgcctacctgcattc

SEQ ID NO: 1911080 - DNA, 15 bp, Homo sapiens
gcctacctgcattct

SEQ ID NO: 1911081 - DNA, 15 bp, Homo sapiens
cctacctgcattctg

SEQ ID NO: 1911082 - DNA, 15 bp, Homo sapiens
ctacctgcattctgc

SEQ ID NO: 1911083 - DNA, 15 bp, Homo sapiens
acctgcattctgcca

SEQ ID NO: 1911084 - DNA, 15 bp, Homo sapiens
cctgcattctgccac

SEQ ID NO: 1911085 - DNA, 15 bp, Homo sapiens
ctgcattctgccacc

SEQ ID NO: 1911086 - DNA, 15 bp, Homo sapiens
tgcattctgccaccc

SEQ ID NO: 1911087 - DNA, 15 bp, Homo sapiens
gcattctgccacccc

SEQ ID NO: 1911088 - DNA, 15 bp, Homo sapiens
cattctgccacccct

SEQ ID NO: 1911089 - DNA, 15 bp, Homo sapiens
attctgccacccctc

SEQ ID NO: 1911090 - DNA, 15 bp, Homo sapiens
ttctgccacccctca

SEQ ID NO: 1911091 - DNA, 15 bp, Homo sapiens
tctgccacccctcac

SEQ ID NO: 1911092 - DNA, 15 bp, Homo sapiens
ctgccacccctcaca

SEQ ID NO: 1911093 - DNA, 15 bp, Homo sapiens
tgccacccctcacac

SEQ ID NO: 1911094 - DNA, 15 bp, Homo sapiens
gccacccctcacaca

SEQ ID NO: 1911095 - DNA, 15 bp, Homo sapiens
ccacccctcacacag

SEQ ID NO: 1911096 - DNA, 15 bp, Homo sapiens
cacccctcacacagc

SEQ ID NO: 1911097 - DNA, 15 bp, Homo sapiens
acccctcacacagcc

SEQ ID NO: 1911098 - DNA, 15 bp, Homo sapiens
cccctcacacagcca

SEQ ID NO: 1911099 - DNA, 15 bp, Homo sapiens
ccctcacacagccaa

SEQ ID NO: 1911100 - DNA, 15 bp, Homo sapiens
cctcacacagccaaa

SEQ ID NO: 1911101 - DNA, 15 bp, Homo sapiens
ctcacacagccaaac

SEQ ID NO: 1911102 - DNA, 15 bp, Homo sapiens
tcacacagccaaacc

SEQ ID NO: 1911103 - DNA, 15 bp, Homo sapiens
cacacagccaaaccc

SEQ ID NO: 1911104 - DNA, 15 bp, Homo sapiens
acacagccaaacccc

SEQ ID NO: 1911105 - DNA, 15 bp, Homo sapiens
cacagccaaacccca

SEQ ID NO: 1911106 - DNA, 15 bp, Homo sapiens
acagccaaaccccag

SEQ ID NO: 1911107 - DNA, 15 bp, Homo sapiens
cagccaaaccccaga

SEQ ID NO: 1911108 - DNA, 15 bp, Homo sapiens
agccaaaccccagat

SEQ ID NO: 1911109 - DNA, 15 bp, Homo sapiens
gccaaaccccagatc

SEQ ID NO: 1911110 - DNA, 15 bp, Homo sapiens
caaaccccagatcat

SEQ ID NO: 1911111 - DNA, 15 bp, Homo sapiens
aaaccccagatcatc

SEQ ID NO: 1911112 - DNA, 15 bp, Homo sapiens
aaccccagatcatct

SEQ ID NO: 1911113 - DNA, 15 bp, Homo sapiens
accccagatcatctg

SEQ ID NO: 1911114 - DNA, 15 bp, Homo sapiens
ccccagatcatctga

SEQ ID NO: 1911115 - DNA, 15 bp, Homo sapiens
cccagatcatctgaa

SEQ ID NO: 1911116 - DNA, 15 bp, Homo sapiens
ccagatcatctgaaa

SEQ ID NO: 1911117 - DNA, 15 bp, Homo sapiens
cagatcatctgaaac

SEQ ID NO: 1911118 - DNA, 15 bp, Homo sapiens
agatcatctgaaact

SEQ ID NO: 1911119 - DNA, 15 bp, Homo sapiens
gatcatctgaaacta

SEQ ID NO: 1911120 - DNA, 15 bp, Homo sapiens
atcatctgaaactac

SEQ ID NO: 1911121 - DNA, 15 bp, Homo sapiens
tcatctgaaactact

SEQ ID NO: 1911122 - DNA, 15 bp, Homo sapiens
catctgaaactacta

SEQ ID NO: 1911123 - DNA, 15 bp, Homo sapiens
atctgaaactactaa

SEQ ID NO: 1911124 - DNA, 15 bp, Homo sapiens
tctgaaactactaac

SEQ ID NO: 1911125 - DNA, 15 bp, Homo sapiens
ctgaaactactaact

SEQ ID NO: 1911126 - DNA, 15 bp, Homo sapiens
tgaaactactaactt

SEQ ID NO: 1911127 - DNA, 15 bp, Homo sapiens
gaaactactaacttt

SEQ ID NO: 1911128 - DNA, 15 bp, Homo sapiens
aaactactaactttg

SEQ ID NO: 1911129 - DNA, 15 bp, Homo sapiens
aactactaactttgt

SEQ ID NO: 1911130 - DNA, 15 bp, Homo sapiens
actactaactttgtg

SEQ ID NO: 1911131 - DNA, 15 bp, Homo sapiens
ctactaactttgtgg

SEQ ID NO: 1911132 - DNA, 15 bp, Homo sapiens
tactaactttgtggt

SEQ ID NO: 1911133 - DNA, 15 bp, Homo sapiens
actaactttgtggtt

SEQ ID NO: 1911134 - DNA, 15 bp, Homo sapiens
ctaactttgtggttc

SEQ ID NO: 1911135 - DNA, 15 bp, Homo sapiens
taactttgtggttcc

SEQ ID NO: 1911136 - DNA, 15 bp, Homo sapiens
aactttgtggttcca

SEQ ID NO: 1911137 - DNA, 15 bp, Homo sapiens
actttgtggttccag

SEQ ID NO: 1911138 - DNA, 15 bp, Homo sapiens
ctttgtggttccaga

SEQ ID NO: 1911139 - DNA, 15 bp, Homo sapiens
tttgtggttccagat

SEQ ID NO: 1911140 - DNA, 15 bp, Homo sapiens
ttgtggttccagatt

SEQ ID NO: 1911141 - DNA, 15 bp, Homo sapiens
tgtggttccagattt

SEQ ID NO: 1911142 - DNA, 15 bp, Homo sapiens
gtggttccagatttt

SEQ ID NO: 1911143 - DNA, 15 bp, Homo sapiens
tggttccagattttt

SEQ ID NO: 1911144 - DNA, 15 bp, Homo sapiens
ggttccagatttttt

SEQ ID NO: 1911145 - DNA, 15 bp, Homo sapiens
gttccagattttttt

SEQ ID NO: 1911146 - DNA, 15 bp, Homo sapiens
gagtcccctgctttt

SEQ ID NO: 1911147 - DNA, 15 bp, Homo sapiens
agtcccctgcttttt

SEQ ID NO: 1911148 - DNA, 15 bp, Homo sapiens
gtcccctgcttttta

SEQ ID NO: 1911149 - DNA, 15 bp, Homo sapiens
tcccctgctttttaa

SEQ ID NO: 1911150 - DNA, 15 bp, Homo sapiens
cccctgctttttaag

SEQ ID NO: 1911151 - DNA, 15 bp, Homo sapiens
ccctgctttttaagg

SEQ ID NO: 1911152 - DNA, 15 bp, Homo sapiens
cctgctttttaagga

SEQ ID NO: 1911153 - DNA, 15 bp, Homo sapiens
ctgctttttaaggaa

SEQ ID NO: 1911154 - DNA, 15 bp, Homo sapiens
tgctttttaaggaat

SEQ ID NO: 1911155 - DNA, 15 bp, Homo sapiens
gctttttaaggaatc

SEQ ID NO: 1911156 - DNA, 15 bp, Homo sapiens
ctttttaaggaatct

SEQ ID NO: 1911157 - DNA, 15 bp, Homo sapiens
tttttaaggaatctg

SEQ ID NO: 1911158 - DNA, 15 bp, Homo sapiens
ttttaaggaatctgt

SEQ ID NO: 1911159 - DNA, 15 bp, Homo sapiens
tttaaggaatctgtg

SEQ ID NO: 1911160 - DNA, 15 bp, Homo sapiens
ttaaggaatctgtgc

SEQ ID NO: 1911161 - DNA, 15 bp, Homo sapiens
taaggaatctgtgcc

SEQ ID NO: 1911162 - DNA, 15 bp, Homo sapiens
aaggaatctgtgccc

SEQ ID NO: 1911163 - DNA, 15 bp, Homo sapiens
aggaatctgtgcccc

SEQ ID NO: 1911164 - DNA, 15 bp, Homo sapiens
ggaatctgtgccccc

SEQ ID NO: 1911165 - DNA, 15 bp, Homo sapiens
gaatctgtgccccct

SEQ ID NO: 1911166 - DNA, 15 bp, Homo sapiens
aatctgtgcccccta

SEQ ID NO: 1911167 - DNA, 15 bp, Homo sapiens
atctgtgccccctaa

SEQ ID NO: 1911168 - DNA, 15 bp, Homo sapiens
tctgtgccccctaaa

SEQ ID NO: 1911169 - DNA, 15 bp, Homo sapiens
ctgtgccccctaaac

SEQ ID NO: 1911170 - DNA, 15 bp, Homo sapiens
tgtgccccctaaact

SEQ ID NO: 1911171 - DNA, 15 bp, Homo sapiens
gtgccccctaaactg

SEQ ID NO: 1911172 - DNA, 15 bp, Homo sapiens
tgccccctaaactgg

SEQ ID NO: 1911173 - DNA, 15 bp, Homo sapiens
gccccctaaactggc

SEQ ID NO: 1911174 - DNA, 15 bp, Homo sapiens
ccccctaaactggct

SEQ ID NO: 1911175 - DNA, 15 bp, Homo sapiens
cccctaaactggctc

SEQ ID NO: 1911176 - DNA, 15 bp, Homo sapiens
ccctaaactggctcc

SEQ ID NO: 1911177 - DNA, 15 bp, Homo sapiens
cctaaactggctcct

SEQ ID NO: 1911178 - DNA, 15 bp, Homo sapiens
ctaaactggctcctt

SEQ ID NO: 1911179 - DNA, 15 bp, Homo sapiens
taaactggctcctta

SEQ ID NO: 1911180 - DNA, 15 bp, Homo sapiens
aaactggctccttac

SEQ ID NO: 1911181 - DNA, 15 bp, Homo sapiens
aactggctccttacc

SEQ ID NO: 1911182 - DNA, 15 bp, Homo sapiens
actggctccttaccc

SEQ ID NO: 1911183 - DNA, 15 bp, Homo sapiens
ctggctccttaccct

SEQ ID NO: 1911184 - DNA, 15 bp, Homo sapiens
tggctccttaccctt

SEQ ID NO: 1911185 - DNA, 15 bp, Homo sapiens
ggctccttacccttc

SEQ ID NO: 1911186 - DNA, 15 bp, Homo sapiens
gctccttacccttct

SEQ ID NO: 1911187 - DNA, 15 bp, Homo sapiens
ctccttacccttctg

SEQ ID NO: 1911188 - DNA, 15 bp, Homo sapiens
tccttacccttctga

SEQ ID NO: 1911189 - DNA, 15 bp, Homo sapiens
ccttacccttctgag

SEQ ID NO: 1911190 - DNA, 15 bp, Homo sapiens
cttacccttctgaga

SEQ ID NO: 1911191 - DNA, 15 bp, Homo sapiens
ttacccttctgagaa

SEQ ID NO: 1911192 - DNA, 15 bp, Homo sapiens
tacccttctgagaag

SEQ ID NO: 1911193 - DNA, 15 bp, Homo sapiens
acccttctgagaagc

SEQ ID NO: 1911194 - DNA, 15 bp, Homo sapiens
cccttctgagaagca

SEQ ID NO: 1911195 - DNA, 15 bp, Homo sapiens
ccttctgagaagcat

SEQ ID NO: 1911196 - DNA, 15 bp, Homo sapiens
cttctgagaagcatt

SEQ ID NO: 1911197 - DNA, 15 bp, Homo sapiens
ttctgagaagcattg

SEQ ID NO: 1911198 - DNA, 15 bp, Homo sapiens
tctgagaagcattga

SEQ ID NO: 1911199 - DNA, 15 bp, Homo sapiens
ctgagaagcattgac

SEQ ID NO: 1911200 - DNA, 15 bp, Homo sapiens
tgagaagcattgaca

SEQ ID NO: 1911201 - DNA, 15 bp, Homo sapiens
gagaagcattgacag

SEQ ID NO: 1911202 - DNA, 15 bp, Homo sapiens
agaagcattgacagt

SEQ ID NO: 1911203 - DNA, 15 bp, Homo sapiens
gaagcattgacagta

SEQ ID NO: 1911204 - DNA, 15 bp, Homo sapiens
aagcattgacagtat

SEQ ID NO: 1911205 - DNA, 15 bp, Homo sapiens
agcattgacagtatt

SEQ ID NO: 1911206 - DNA, 15 bp, Homo sapiens
gcattgacagtattc

SEQ ID NO: 1911207 - DNA, 15 bp, Homo sapiens
cattgacagtattcc

SEQ ID NO: 1911208 - DNA, 15 bp, Homo sapiens
attgacagtattcca

SEQ ID NO: 1911209 - DNA, 15 bp, Homo sapiens
ttgacagtattccag

SEQ ID NO: 1911210 - DNA, 15 bp, Homo sapiens
tgacagtattccagg

SEQ ID NO: 1911211 - DNA, 15 bp, Homo sapiens
gacagtattccaggg

SEQ ID NO: 1911212 - DNA, 15 bp, Homo sapiens
acagtattccagggg

SEQ ID NO: 1911213 - DNA, 15 bp, Homo sapiens
cagtattccaggggt

SEQ ID NO: 1911214 - DNA, 15 bp, Homo sapiens
agtattccaggggtg

SEQ ID NO: 1911215 - DNA, 15 bp, Homo sapiens
gtattccaggggtgg

SEQ ID NO: 1911216 - DNA, 15 bp, Homo sapiens
tattccaggggtggc

SEQ ID NO: 1911217 - DNA, 15 bp, Homo sapiens
attccaggggtggcc

SEQ ID NO: 1911218 - DNA, 15 bp, Homo sapiens
ttccaggggtggcca

SEQ ID NO: 1911219 - DNA, 15 bp, Homo sapiens
tccaggggtggccag

SEQ ID NO: 1911220 - DNA, 15 bp, Homo sapiens
ccaggggtggccagc

SEQ ID NO: 1911221 - DNA, 15 bp, Homo sapiens
caggggtggccagca

SEQ ID NO: 1911222 - DNA, 15 bp, Homo sapiens
aggggtggccagcac

SEQ ID NO: 1911223 - DNA, 15 bp, Homo sapiens
ggggtggccagcacc

SEQ ID NO: 1911224 - DNA, 15 bp, Homo sapiens
gggtggccagcaccc

SEQ ID NO: 1911225 - DNA, 15 bp, Homo sapiens
ggtggccagcaccct

SEQ ID NO: 1911226 - DNA, 15 bp, Homo sapiens
gtggccagcaccctg

SEQ ID NO: 1911227 - DNA, 15 bp, Homo sapiens
tggccagcaccctga

SEQ ID NO: 1911228 - DNA, 15 bp, Homo sapiens
ggccagcaccctgaa

SEQ ID NO: 1911229 - DNA, 15 bp, Homo sapiens
gccagcaccctgaaa

SEQ ID NO: 1911230 - DNA, 15 bp, Homo sapiens
ccagcaccctgaaaa

SEQ ID NO: 1911231 - DNA, 15 bp, Homo sapiens
cagcaccctgaaaac

SEQ ID NO: 1911232 - DNA, 15 bp, Homo sapiens
agcaccctgaaaacc

SEQ ID NO: 1911233 - DNA, 15 bp, Homo sapiens
gcaccctgaaaacca

SEQ ID NO: 1911234 - DNA, 15 bp, Homo sapiens
caccctgaaaaccac

SEQ ID NO: 1911235 - DNA, 15 bp, Homo sapiens
accctgaaaaccaca

SEQ ID NO: 1911236 - DNA, 15 bp, Homo sapiens
ccctgaaaaccacag

SEQ ID NO: 1911237 - DNA, 15 bp, Homo sapiens
cctgaaaaccacagc

SEQ ID NO: 1911238 - DNA, 15 bp, Homo sapiens
ctgaaaaccacagca

SEQ ID NO: 1911239 - DNA, 15 bp, Homo sapiens
tgaaaaccacagcaa

SEQ ID NO: 1911240 - DNA, 15 bp, Homo sapiens
gaaaaccacagcaaa

SEQ ID NO: 1911241 - DNA, 15 bp, Homo sapiens
aaaaccacagcaaag

SEQ ID NO: 1911242 - DNA, 15 bp, Homo sapiens
aaaccacagcaaagc

SEQ ID NO: 1911243 - DNA, 15 bp, Homo sapiens
aaccacagcaaagcg

SEQ ID NO: 1911244 - DNA, 15 bp, Homo sapiens
accacagcaaagcgg

SEQ ID NO: 1911245 - DNA, 15 bp, Homo sapiens
ccacagcaaagcggg

SEQ ID NO: 1911246 - DNA, 15 bp, Homo sapiens
cacagcaaagcgggc

SEQ ID NO: 1911247 - DNA, 15 bp, Homo sapiens
acagcaaagcgggca

SEQ ID NO: 1911248 - DNA, 15 bp, Homo sapiens
cagcaaagcgggcag

SEQ ID NO: 1911249 - DNA, 15 bp, Homo sapiens
agcaaagcgggcaga

SEQ ID NO: 1911250 - DNA, 15 bp, Homo sapiens
gcaaagcgggcagag

SEQ ID NO: 1911251 - DNA, 15 bp, Homo sapiens
caaagcgggcagagt

SEQ ID NO: 1911252 - DNA, 15 bp, Homo sapiens
aaagcgggcagagtt

SEQ ID NO: 1911253 - DNA, 15 bp, Homo sapiens
aagcgggcagagtta

SEQ ID NO: 1911254 - DNA, 15 bp, Homo sapiens
agcgggcagagttaa

SEQ ID NO: 1911255 - DNA, 15 bp, Homo sapiens
gcgggcagagttaaa

SEQ ID NO: 1911256 - DNA, 15 bp, Homo sapiens
cgggcagagttaaaa

SEQ ID NO: 1911257 - DNA, 15 bp, Homo sapiens
gggcagagttaaaat

SEQ ID NO: 1911258 - DNA, 15 bp, Homo sapiens
ggcagagttaaaatt

SEQ ID NO: 1911259 - DNA, 15 bp, Homo sapiens
gcagagttaaaattt

SEQ ID NO: 1911260 - DNA, 15 bp, Homo sapiens
cagagttaaaattta

SEQ ID NO: 1911261 - DNA, 15 bp, Homo sapiens
agagttaaaatttaa

SEQ ID NO: 1911262 - DNA, 15 bp, Homo sapiens
gagttaaaatttaag

SEQ ID NO: 1911263 - DNA, 15 bp, Homo sapiens
agttaaaatttaaga

SEQ ID NO: 1911264 - DNA, 15 bp, Homo sapiens
gttaaaatttaagac

SEQ ID NO: 1911265 - DNA, 15 bp, Homo sapiens
ttaaaatttaagact

SEQ ID NO: 1911266 - DNA, 15 bp, Homo sapiens
taaaatttaagacta

SEQ ID NO: 1911267 - DNA, 15 bp, Homo sapiens
aaaatttaagactaa

SEQ ID NO: 1911268 - DNA, 15 bp, Homo sapiens
aaatttaagactaaa

SEQ ID NO: 1911269 - DNA, 15 bp, Homo sapiens
aatttaagactaaaa

SEQ ID NO: 1911270 - DNA, 15 bp, Homo sapiens
atttaagactaaaaa

SEQ ID NO: 1911271 - DNA, 15 bp, Homo sapiens
tttaagactaaaaat

SEQ ID NO: 1911272 - DNA, 15 bp, Homo sapiens
ttaagactaaaaatg

SEQ ID NO: 1911273 - DNA, 15 bp, Homo sapiens
taagactaaaaatga

SEQ ID NO: 1911274 - DNA, 15 bp, Homo sapiens
aagactaaaaatgac

SEQ ID NO: 1911275 - DNA, 15 bp, Homo sapiens
agactaaaaatgaca

SEQ ID NO: 1911276 - DNA, 15 bp, Homo sapiens
gactaaaaatgacag

SEQ ID NO: 1911277 - DNA, 15 bp, Homo sapiens
actaaaaatgacagc

SEQ ID NO: 1911278 - DNA, 15 bp, Homo sapiens
ctaaaaatgacagca

SEQ ID NO: 1911279 - DNA, 15 bp, Homo sapiens
taaaaatgacagcat

SEQ ID NO: 1911280 - DNA, 15 bp, Homo sapiens
aaaaatgacagcatc

SEQ ID NO: 1911281 - DNA, 15 bp, Homo sapiens
aaaatgacagcatca

SEQ ID NO: 1911282 - DNA, 15 bp, Homo sapiens
aaatgacagcatcag

SEQ ID NO: 1911283 - DNA, 15 bp, Homo sapiens
aatgacagcatcagg

SEQ ID NO: 1911284 - DNA, 15 bp, Homo sapiens
atgacagcatcaggc

SEQ ID NO: 1911285 - DNA, 15 bp, Homo sapiens
tgacagcatcaggca

SEQ ID NO: 1911286 - DNA, 15 bp, Homo sapiens
gacagcatcaggcat

SEQ ID NO: 1911287 - DNA, 15 bp, Homo sapiens
acagcatcaggcatg

SEQ ID NO: 1911288 - DNA, 15 bp, Homo sapiens
cagcatcaggcatgc

SEQ ID NO: 1911289 - DNA, 15 bp, Homo sapiens
agcatcaggcatgca

SEQ ID NO: 1911290 - DNA, 15 bp, Homo sapiens
gcatcaggcatgcac

SEQ ID NO: 1911291 - DNA, 15 bp, Homo sapiens
catcaggcatgcacg

SEQ ID NO: 1911292 - DNA, 15 bp, Homo sapiens
atcaggcatgcacgc

SEQ ID NO: 1911293 - DNA, 15 bp, Homo sapiens
tcaggcatgcacgcg

SEQ ID NO: 1911294 - DNA, 15 bp, Homo sapiens
caggcatgcacgcgg

SEQ ID NO: 1911295 - DNA, 15 bp, Homo sapiens
aggcatgcacgcggg

SEQ ID NO: 1911296 - DNA, 15 bp, Homo sapiens
ggcatgcacgcggga

SEQ ID NO: 1911297 - DNA, 15 bp, Homo sapiens
gcatgcacgcgggaa

SEQ ID NO: 1911298 - DNA, 15 bp, Homo sapiens
catgcacgcgggaag

SEQ ID NO: 1911299 - DNA, 15 bp, Homo sapiens
atgcacgcgggaagg

SEQ ID NO: 1911300 - DNA, 15 bp, Homo sapiens
tgcacgcgggaagga

SEQ ID NO: 1911301 - DNA, 15 bp, Homo sapiens
gcacgcgggaaggaa

SEQ ID NO: 1911302 - DNA, 15 bp, Homo sapiens
cacgcgggaaggaac

SEQ ID NO: 1911303 - DNA, 15 bp, Homo sapiens
acgcgggaaggaaca

SEQ ID NO: 1911304 - DNA, 15 bp, Homo sapiens
cgcgggaaggaacag

SEQ ID NO: 1911305 - DNA, 15 bp, Homo sapiens
gcgggaaggaacaga

SEQ ID NO: 1911306 - DNA, 15 bp, Homo sapiens
cgggaaggaacagaa

SEQ ID NO: 1911307 - DNA, 15 bp, Homo sapiens
gggaaggaacagaac

SEQ ID NO: 1911308 - DNA, 15 bp, Homo sapiens
ggaaggaacagaaca

SEQ ID NO: 1911309 - DNA, 15 bp, Homo sapiens
gaaggaacagaacaa

SEQ ID NO: 1911310 - DNA, 15 bp, Homo sapiens
aaggaacagaacaac

SEQ ID NO: 1911311 - DNA, 15 bp, Homo sapiens
aggaacagaacaacc

SEQ ID NO: 1911312 - DNA, 15 bp, Homo sapiens
ggaacagaacaacca

SEQ ID NO: 1911313 - DNA, 15 bp, Homo sapiens
gaacagaacaaccag

SEQ ID NO: 1911314 - DNA, 15 bp, Homo sapiens
aacagaacaaccagc

SEQ ID NO: 1911315 - DNA, 15 bp, Homo sapiens
acagaacaaccagct

SEQ ID NO: 1911316 - DNA, 15 bp, Homo sapiens
cagaacaaccagctc

SEQ ID NO: 1911317 - DNA, 15 bp, Homo sapiens
agaacaaccagctcc

SEQ ID NO: 1911318 - DNA, 15 bp, Homo sapiens
gaacaaccagctcca

SEQ ID NO: 1911319 - DNA, 15 bp, Homo sapiens
aacaaccagctccag

SEQ ID NO: 1911320 - DNA, 15 bp, Homo sapiens
acaaccagctccagg

SEQ ID NO: 1911321 - DNA, 15 bp, Homo sapiens
caaccagctccaggg

SEQ ID NO: 1911322 - DNA, 15 bp, Homo sapiens
aaccagctccagggg

SEQ ID NO: 1911323 - DNA, 15 bp, Homo sapiens
accagctccaggggt

SEQ ID NO: 1911324 - DNA, 15 bp, Homo sapiens
ccagctccaggggtt

SEQ ID NO: 1911325 - DNA, 15 bp, Homo sapiens
cagctccaggggttc

SEQ ID NO: 1911326 - DNA, 15 bp, Homo sapiens
agctccaggggttcc

SEQ ID NO: 1911327 - DNA, 15 bp, Homo sapiens
gctccaggggttccc

SEQ ID NO: 1911328 - DNA, 15 bp, Homo sapiens
ctccaggggttccca

SEQ ID NO: 1911329 - DNA, 15 bp, Homo sapiens
tccaggggttcccat

SEQ ID NO: 1911330 - DNA, 15 bp, Homo sapiens
ccaggggttcccatc

SEQ ID NO: 1911331 - DNA, 15 bp, Homo sapiens
caggggttcccatca

SEQ ID NO: 1911332 - DNA, 15 bp, Homo sapiens
aggggttcccatcac

SEQ ID NO: 1911333 - DNA, 15 bp, Homo sapiens
ggggttcccatcacc

SEQ ID NO: 1911334 - DNA, 15 bp, Homo sapiens
gggttcccatcaccc

SEQ ID NO: 1911335 - DNA, 15 bp, Homo sapiens
ggttcccatcaccca

SEQ ID NO: 1911336 - DNA, 15 bp, Homo sapiens
gttcccatcacccag

SEQ ID NO: 1911337 - DNA, 15 bp, Homo sapiens
ttcccatcacccagg

SEQ ID NO: 1911338 - DNA, 15 bp, Homo sapiens
tcccatcacccaggg

SEQ ID NO: 1911339 - DNA, 15 bp, Homo sapiens
cccatcacccaggga

SEQ ID NO: 1911340 - DNA, 15 bp, Homo sapiens
ccatcacccagggag

SEQ ID NO: 1911341 - DNA, 15 bp, Homo sapiens
catcacccagggagg

SEQ ID NO: 1911342 - DNA, 15 bp, Homo sapiens
atcacccagggaggc

SEQ ID NO: 1911343 - DNA, 15 bp, Homo sapiens
tcacccagggaggcc

SEQ ID NO: 1911344 - DNA, 15 bp, Homo sapiens
cacccagggaggcca

SEQ ID NO: 1911345 - DNA, 15 bp, Homo sapiens
acccagggaggccac

SEQ ID NO: 1911346 - DNA, 15 bp, Homo sapiens
cccagggaggccacc

SEQ ID NO: 1911347 - DNA, 15 bp, Homo sapiens
ccagggaggccacca

SEQ ID NO: 1911348 - DNA, 15 bp, Homo sapiens
cagggaggccaccaa

SEQ ID NO: 1911349 - DNA, 15 bp, Homo sapiens
gggaggccaccaacg

SEQ ID NO: 1911350 - DNA, 15 bp, Homo sapiens
ggaggccaccaacgc

SEQ ID NO: 1911351 - DNA, 15 bp, Homo sapiens
gaggccaccaacgcc

SEQ ID NO: 1911352 - DNA, 15 bp, Homo sapiens
aggccaccaacgccc

SEQ ID NO: 1911353 - DNA, 15 bp, Homo sapiens
ggccaccaacgcccc

SEQ ID NO: 1911354 - DNA, 15 bp, Homo sapiens
gccaccaacgcccca

SEQ ID NO: 1911355 - DNA, 15 bp, Homo sapiens
ccaccaacgccccaa

SEQ ID NO: 1911356 - DNA, 15 bp, Homo sapiens
caccaacgccccaac

SEQ ID NO: 1911357 - DNA, 15 bp, Homo sapiens
accaacgccccaacc

SEQ ID NO: 1911358 - DNA, 15 bp, Homo sapiens
ccaacgccccaacca

SEQ ID NO: 1911359 - DNA, 15 bp, Homo sapiens
caacgccccaaccag

SEQ ID NO: 1911360 - DNA, 15 bp, Homo sapiens
aacgccccaaccagg

SEQ ID NO: 1911361 - DNA, 15 bp, Homo sapiens
acgccccaaccagga

SEQ ID NO: 1911362 - DNA, 15 bp, Homo sapiens
cgccccaaccaggag

SEQ ID NO: 1911363 - DNA, 15 bp, Homo sapiens
gccccaaccaggagc

SEQ ID NO: 1911364 - DNA, 15 bp, Homo sapiens
ccccaaccaggagcc

SEQ ID NO: 1911365 - DNA, 15 bp, Homo sapiens
cccaaccaggagcca

SEQ ID NO: 1911366 - DNA, 15 bp, Homo sapiens
ccaaccaggagccat

SEQ ID NO: 1911367 - DNA, 15 bp, Homo sapiens
caaccaggagccata

SEQ ID NO: 1911368 - DNA, 15 bp, Homo sapiens
aaccaggagccatag

SEQ ID NO: 1911369 - DNA, 15 bp, Homo sapiens
accaggagccatagc

SEQ ID NO: 1911370 - DNA, 15 bp, Homo sapiens
ccaggagccatagca

SEQ ID NO: 1911371 - DNA, 15 bp, Homo sapiens
caggagccatagcag

SEQ ID NO: 1911372 - DNA, 15 bp, Homo sapiens
aggagccatagcagc

SEQ ID NO: 1911373 - DNA, 15 bp, Homo sapiens
ggagccatagcagca

SEQ ID NO: 1911374 - DNA, 15 bp, Homo sapiens
gagccatagcagcaa

SEQ ID NO: 1911375 - DNA, 15 bp, Homo sapiens
agccatagcagcaaa

SEQ ID NO: 1911376 - DNA, 15 bp, Homo sapiens
gccatagcagcaaat

SEQ ID NO: 1911377 - DNA, 15 bp, Homo sapiens
ccatagcagcaaatt

SEQ ID NO: 1911378 - DNA, 15 bp, Homo sapiens
catagcagcaaattt

SEQ ID NO: 1911379 - DNA, 15 bp, Homo sapiens
atagcagcaaattta

SEQ ID NO: 1911380 - DNA, 15 bp, Homo sapiens
tagcagcaaatttat

SEQ ID NO: 1911381 - DNA, 15 bp, Homo sapiens
agcagcaaatttatg

SEQ ID NO: 1911382 - DNA, 15 bp, Homo sapiens
gcagcaaatttatga

SEQ ID NO: 1911383 - DNA, 15 bp, Homo sapiens
cagcaaatttatgaa

SEQ ID NO: 1911384 - DNA, 15 bp, Homo sapiens
agcaaatttatgaaa

SEQ ID NO: 1911385 - DNA, 15 bp, Homo sapiens
gcaaatttatgaaaa

SEQ ID NO: 1911386 - DNA, 15 bp, Homo sapiens
caaatttatgaaaaa

SEQ ID NO: 1911387 - DNA, 15 bp, Homo sapiens
aaatttatgaaaaaa

SEQ ID NO: 1911388 - DNA, 15 bp, Homo sapiens
aatttatgaaaaaaa

SEQ ID NO: 1911389 - DNA, 15 bp, Homo sapiens
atttatgaaaaaaat

SEQ ID NO: 1911390 - DNA, 15 bp, Homo sapiens
tttatgaaaaaaata

SEQ ID NO: 1911391 - DNA, 15 bp, Homo sapiens
ttatgaaaaaaatat

SEQ ID NO: 1911392 - DNA, 15 bp, Homo sapiens
tatgaaaaaaatatt

SEQ ID NO: 1911393 - DNA, 15 bp, Homo sapiens
atgaaaaaaatattt

SEQ ID NO: 1911394 - DNA, 15 bp, Homo sapiens
tgaaaaaaatatttt

SEQ ID NO: 1911395 - DNA, 15 bp, Homo sapiens
gaaaaaaatatttta

SEQ ID NO: 1911396 - DNA, 15 bp, Homo sapiens
aaaaaaatattttat

SEQ ID NO: 1911397 - DNA, 15 bp, Homo sapiens
aaaaaatattttatt

SEQ ID NO: 1911398 - DNA, 15 bp, Homo sapiens
aaaaatattttattc

SEQ ID NO: 1911399 - DNA, 15 bp, Homo sapiens
aaaatattttattcc

SEQ ID NO: 1911400 - DNA, 15 bp, Homo sapiens
aaatattttattcca

SEQ ID NO: 1911401 - DNA, 15 bp, Homo sapiens
aatattttattccaa

SEQ ID NO: 1911402 - DNA, 15 bp, Homo sapiens
atattttattccaaa

SEQ ID NO: 1911403 - DNA, 15 bp, Homo sapiens
tattttattccaaaa

SEQ ID NO: 1911404 - DNA, 15 bp, Homo sapiens
attttattccaaaac

SEQ ID NO: 1911405 - DNA, 15 bp, Homo sapiens
ttttattccaaaaca

SEQ ID NO: 1911406 - DNA, 15 bp, Homo sapiens
tttattccaaaacac

SEQ ID NO: 1911407 - DNA, 15 bp, Homo sapiens
ttattccaaaacact

SEQ ID NO: 1911408 - DNA, 15 bp, Homo sapiens
tattccaaaacactg

SEQ ID NO: 1911409 - DNA, 15 bp, Homo sapiens
attccaaaacactgt

SEQ ID NO: 1911410 - DNA, 15 bp, Homo sapiens
ttccaaaacactgtt

SEQ ID NO: 1911411 - DNA, 15 bp, Homo sapiens
tccaaaacactgttt

SEQ ID NO: 1911412 - DNA, 15 bp, Homo sapiens
ccaaaacactgttta

SEQ ID NO: 1911413 - DNA, 15 bp, Homo sapiens
caaaacactgtttac

SEQ ID NO: 1911414 - DNA, 15 bp, Homo sapiens
aaaacactgtttaca

SEQ ID NO: 1911415 - DNA, 15 bp, Homo sapiens
aaacactgtttacac

SEQ ID NO: 1911416 - DNA, 15 bp, Homo sapiens
aacactgtttacaca

SEQ ID NO: 1911417 - DNA, 15 bp, Homo sapiens
acactgtttacacaa

SEQ ID NO: 1911418 - DNA, 15 bp, Homo sapiens
cactgtttacacaaa

SEQ ID NO: 1911419 - DNA, 15 bp, Homo sapiens
actgtttacacaaat

SEQ ID NO: 1911420 - DNA, 15 bp, Homo sapiens
tgtttacacaaatgt

SEQ ID NO: 1911421 - DNA, 15 bp, Homo sapiens
gtttacacaaatgtg

SEQ ID NO: 1911422 - DNA, 15 bp, Homo sapiens
tttacacaaatgtgt

SEQ ID NO: 1911423 - DNA, 15 bp, Homo sapiens
ttacacaaatgtgtg

SEQ ID NO: 1911424 - DNA, 15 bp, Homo sapiens
tacacaaatgtgtgg

SEQ ID NO: 1911425 - DNA, 15 bp, Homo sapiens
acacaaatgtgtggt

SEQ ID NO: 1911426 - DNA, 15 bp, Homo sapiens
cacaaatgtgtggtc

SEQ ID NO: 1911427 - DNA, 15 bp, Homo sapiens
acaaatgtgtggtct

SEQ ID NO: 1911428 - DNA, 15 bp, Homo sapiens
caaatgtgtggtctt

SEQ ID NO: 1911429 - DNA, 15 bp, Homo sapiens
aaatgtgtggtcttt

SEQ ID NO: 1911430 - DNA, 15 bp, Homo sapiens
aatgtgtggtctttg

SEQ ID NO: 1911431 - DNA, 15 bp, Homo sapiens
atgtgtggtctttgt

SEQ ID NO: 1911432 - DNA, 15 bp, Homo sapiens
tgtgtggtctttgta

SEQ ID NO: 1911433 - DNA, 15 bp, Homo sapiens
gtgtggtctttgtac

SEQ ID NO: 1911434 - DNA, 15 bp, Homo sapiens
tgtggtctttgtaca

SEQ ID NO: 1911435 - DNA, 15 bp, Homo sapiens
gtggtctttgtacaa

SEQ ID NO: 1911436 - DNA, 15 bp, Homo sapiens
tggtctttgtacaaa

SEQ ID NO: 1911437 - DNA, 15 bp, Homo sapiens
ggtctttgtacaaag

SEQ ID NO: 1911438 - DNA, 15 bp, Homo sapiens
gtctttgtacaaagt

SEQ ID NO: 1911439 - DNA, 15 bp, Homo sapiens
tctttgtacaaagta

SEQ ID NO: 1911440 - DNA, 15 bp, Homo sapiens
ctttgtacaaagtac

SEQ ID NO: 1911441 - DNA, 15 bp, Homo sapiens
tttgtacaaagtaca

SEQ ID NO: 1911442 - DNA, 15 bp, Homo sapiens
ttgtacaaagtacaa

SEQ ID NO: 1911443 - DNA, 15 bp, Homo sapiens
tgtacaaagtacaaa

SEQ ID NO: 1911444 - DNA, 15 bp, Homo sapiens
gtacaaagtacaaaa

SEQ ID NO: 1911445 - DNA, 15 bp, Homo sapiens
tacaaagtacaaaaa

SEQ ID NO: 1911446 - DNA, 15 bp, Homo sapiens
acaaagtacaaaaaa

SEQ ID NO: 1911447 - DNA, 15 bp, Homo sapiens
caaagtacaaaaaaa

SEQ ID NO: 1911448 - DNA, 15 bp, Homo sapiens
aaagtacaaaaaaac

SEQ ID NO: 1911449 - DNA, 15 bp, Homo sapiens
aagtacaaaaaaacc

SEQ ID NO: 1911450 - DNA, 15 bp, Homo sapiens
agtacaaaaaaaccc

SEQ ID NO: 1911451 - DNA, 15 bp, Homo sapiens
gtacaaaaaaacccc

SEQ ID NO: 1911452 - DNA, 15 bp, Homo sapiens
tacaaaaaaacccct

SEQ ID NO: 1911453 - DNA, 15 bp, Homo sapiens
acaaaaaaacccctc

SEQ ID NO: 1911454 - DNA, 15 bp, Homo sapiens
caaaaaaacccctct

SEQ ID NO: 1911455 - DNA, 15 bp, Homo sapiens
aaaaaaacccctctt

SEQ ID NO: 1911456 - DNA, 15 bp, Homo sapiens
aaaaaacccctcttc

SEQ ID NO: 1911457 - DNA, 15 bp, Homo sapiens
aaaaacccctcttct

SEQ ID NO: 1911458 - DNA, 15 bp, Homo sapiens
aaaacccctcttctc

SEQ ID NO: 1911459 - DNA, 15 bp, Homo sapiens
aaacccctcttctca

SEQ ID NO: 1911460 - DNA, 15 bp, Homo sapiens
aacccctcttctcat

SEQ ID NO: 1911461 - DNA, 15 bp, Homo sapiens
acccctcttctcatc

SEQ ID NO: 1911462 - DNA, 15 bp, Homo sapiens
cccctcttctcatcc

SEQ ID NO: 1911463 - DNA, 15 bp, Homo sapiens
ccctcttctcatccc

SEQ ID NO: 1911464 - DNA, 15 bp, Homo sapiens
cctcttctcatcccc

SEQ ID NO: 1911465 - DNA, 15 bp, Homo sapiens
ctcttctcatcccca

SEQ ID NO: 1911466 - DNA, 15 bp, Homo sapiens
tcttctcatccccac

SEQ ID NO: 1911467 - DNA, 15 bp, Homo sapiens
cttctcatccccacc

SEQ ID NO: 1911468 - DNA, 15 bp, Homo sapiens
ttctcatccccacct

SEQ ID NO: 1911469 - DNA, 15 bp, Homo sapiens
tctcatccccacctc

SEQ ID NO: 1911470 - DNA, 15 bp, Homo sapiens
ctcatccccacctcc

SEQ ID NO: 1911471 - DNA, 15 bp, Homo sapiens
tcatccccacctccc

SEQ ID NO: 1911472 - DNA, 15 bp, Homo sapiens
catccccacctccct

SEQ ID NO: 1911473 - DNA, 15 bp, Homo sapiens
atccccacctccctt

SEQ ID NO: 1911474 - DNA, 15 bp, Homo sapiens
tccccacctcccttc

SEQ ID NO: 1911475 - DNA, 15 bp, Homo sapiens
ccccacctcccttca

SEQ ID NO: 1911476 - DNA, 15 bp, Homo sapiens
cccacctcccttcag

SEQ ID NO: 1911477 - DNA, 15 bp, Homo sapiens
ccacctcccttcaga

SEQ ID NO: 1911478 - DNA, 15 bp, Homo sapiens
cacctcccttcagag

SEQ ID NO: 1911479 - DNA, 15 bp, Homo sapiens
acctcccttcagaga

SEQ ID NO: 1911480 - DNA, 15 bp, Homo sapiens
cctcccttcagagaa

SEQ ID NO: 1911481 - DNA, 15 bp, Homo sapiens
ctcccttcagagaag

SEQ ID NO: 1911482 - DNA, 15 bp, Homo sapiens
tcccttcagagaagt

SEQ ID NO: 1911483 - DNA, 15 bp, Homo sapiens
cccttcagagaagtt

SEQ ID NO: 1911484 - DNA, 15 bp, Homo sapiens
ccttcagagaagttt

SEQ ID NO: 1911485 - DNA, 15 bp, Homo sapiens
cttcagagaagttta

SEQ ID NO: 1911486 - DNA, 15 bp, Homo sapiens
ttcagagaagtttaa

SEQ ID NO: 1911487 - DNA, 15 bp, Homo sapiens
tcagagaagtttaaa

SEQ ID NO: 1911488 - DNA, 15 bp, Homo sapiens
cagagaagtttaaac

SEQ ID NO: 1911489 - DNA, 15 bp, Homo sapiens
agagaagtttaaacc

SEQ ID NO: 1911490 - DNA, 15 bp, Homo sapiens
gagaagtttaaacct

SEQ ID NO: 1911491 - DNA, 15 bp, Homo sapiens
agaagtttaaacctt

SEQ ID NO: 1911492 - DNA, 15 bp, Homo sapiens
gaagtttaaaccttg

SEQ ID NO: 1911493 - DNA, 15 bp, Homo sapiens
aagtttaaaccttgg

SEQ ID NO: 1911494 - DNA, 15 bp, Homo sapiens
agtttaaaccttggg

SEQ ID NO: 1911495 - DNA, 15 bp, Homo sapiens
gtttaaaccttgggc

SEQ ID NO: 1911496 - DNA, 15 bp, Homo sapiens
tttaaaccttgggct

SEQ ID NO: 1911497 - DNA, 15 bp, Homo sapiens
ttaaaccttgggctc

SEQ ID NO: 1911498 - DNA, 15 bp, Homo sapiens
taaaccttgggctct

SEQ ID NO: 1911499 - DNA, 15 bp, Homo sapiens
aaaccttgggctctc

SEQ ID NO: 1911500 - DNA, 15 bp, Homo sapiens
aaccttgggctctca

SEQ ID NO: 1911501 - DNA, 15 bp, Homo sapiens
accttgggctctcaa

SEQ ID NO: 1911502 - DNA, 15 bp, Homo sapiens
ccttgggctctcaat

SEQ ID NO: 1911503 - DNA, 15 bp, Homo sapiens
cttgggctctcaatc

SEQ ID NO: 1911504 - DNA, 15 bp, Homo sapiens
ttgggctctcaatct

SEQ ID NO: 1911505 - DNA, 15 bp, Homo sapiens
tgggctctcaatctt

SEQ ID NO: 1911506 - DNA, 15 bp, Homo sapiens
gggctctcaatcttc

SEQ ID NO: 1911507 - DNA, 15 bp, Homo sapiens
ggctctcaatcttcc

SEQ ID NO: 1911508 - DNA, 15 bp, Homo sapiens
gctctcaatcttcca

SEQ ID NO: 1911509 - DNA, 15 bp, Homo sapiens
ctctcaatcttccat

SEQ ID NO: 1911510 - DNA, 15 bp, Homo sapiens
tctcaatcttccatg

SEQ ID NO: 1911511 - DNA, 15 bp, Homo sapiens
ctcaatcttccatgg

SEQ ID NO: 1911512 - DNA, 15 bp, Homo sapiens
tcaatcttccatggt

SEQ ID NO: 1911513 - DNA, 15 bp, Homo sapiens
caatcttccatggtc

SEQ ID NO: 1911514 - DNA, 15 bp, Homo sapiens
aatcttccatggtca

SEQ ID NO: 1911515 - DNA, 15 bp, Homo sapiens
atcttccatggtcag

SEQ ID NO: 1911516 - DNA, 15 bp, Homo sapiens
tcttccatggtcagc

SEQ ID NO: 1911517 - DNA, 15 bp, Homo sapiens
cttccatggtcagct

SEQ ID NO: 1911518 - DNA, 15 bp, Homo sapiens
ttccatggtcagctg

SEQ ID NO: 1911519 - DNA, 15 bp, Homo sapiens
tccatggtcagctgc

SEQ ID NO: 1911520 - DNA, 15 bp, Homo sapiens
ccatggtcagctgcc

SEQ ID NO: 1911521 - DNA, 15 bp, Homo sapiens
catggtcagctgccc

SEQ ID NO: 1911522 - DNA, 15 bp, Homo sapiens
atggtcagctgcccc

SEQ ID NO: 1911523 - DNA, 15 bp, Homo sapiens
tggtcagctgcccct

SEQ ID NO: 1911524 - DNA, 15 bp, Homo sapiens
ggtcagctgcccctg

SEQ ID NO: 1911525 - DNA, 15 bp, Homo sapiens
gtcagctgcccctga

SEQ ID NO: 1911526 - DNA, 15 bp, Homo sapiens
tcagctgcccctgac

SEQ ID NO: 1911527 - DNA, 15 bp, Homo sapiens
cagctgcccctgact

SEQ ID NO: 1911528 - DNA, 15 bp, Homo sapiens
agctgcccctgactg

SEQ ID NO: 1911529 - DNA, 15 bp, Homo sapiens
gctgcccctgactgc

SEQ ID NO: 1911530 - DNA, 15 bp, Homo sapiens
ctgcccctgactgcg

SEQ ID NO: 1911531 - DNA, 15 bp, Homo sapiens
tgcccctgactgcga

SEQ ID NO: 1911532 - DNA, 15 bp, Homo sapiens
gcccctgactgcgag

SEQ ID NO: 1911533 - DNA, 15 bp, Homo sapiens
cccctgactgcgagt

SEQ ID NO: 1911534 - DNA, 15 bp, Homo sapiens
ccctgactgcgagtc

SEQ ID NO: 1911535 - DNA, 15 bp, Homo sapiens
cctgactgcgagtcc

SEQ ID NO: 1911536 - DNA, 15 bp, Homo sapiens
ctgactgcgagtcct

SEQ ID NO: 1911537 - DNA, 15 bp, Homo sapiens
tgactgcgagtccta

SEQ ID NO: 1911538 - DNA, 15 bp, Homo sapiens
gactgcgagtcctac

SEQ ID NO: 1911539 - DNA, 15 bp, Homo sapiens
actgcgagtcctaca

SEQ ID NO: 1911540 - DNA, 15 bp, Homo sapiens
ctgcgagtcctacag

SEQ ID NO: 1911541 - DNA, 15 bp, Homo sapiens
tgcgagtcctacagc

SEQ ID NO: 1911542 - DNA, 15 bp, Homo sapiens
gcgagtcctacagcc

SEQ ID NO: 1911543 - DNA, 15 bp, Homo sapiens
cgagtcctacagcct

SEQ ID NO: 1911544 - DNA, 15 bp, Homo sapiens
gagtcctacagcctc

SEQ ID NO: 1911545 - DNA, 15 bp, Homo sapiens
agtcctacagcctca

SEQ ID NO: 1911546 - DNA, 15 bp, Homo sapiens
gtcctacagcctcag

SEQ ID NO: 1911547 - DNA, 15 bp, Homo sapiens
tcctacagcctcaga

SEQ ID NO: 1911548 - DNA, 15 bp, Homo sapiens
cctacagcctcagag

SEQ ID NO: 1911549 - DNA, 15 bp, Homo sapiens
ctacagcctcagagg

SEQ ID NO: 1911550 - DNA, 15 bp, Homo sapiens
tacagcctcagaggg

SEQ ID NO: 1911551 - DNA, 15 bp, Homo sapiens
acagcctcagaggga

SEQ ID NO: 1911552 - DNA, 15 bp, Homo sapiens
cagcctcagagggag

SEQ ID NO: 1911553 - DNA, 15 bp, Homo sapiens
agcctcagagggagg

SEQ ID NO: 1911554 - DNA, 15 bp, Homo sapiens
gcctcagagggagga

SEQ ID NO: 1911555 - DNA, 15 bp, Homo sapiens
ctcagagggaggagc

SEQ ID NO: 1911556 - DNA, 15 bp, Homo sapiens
tcagagggaggagcg

SEQ ID NO: 1911557 - DNA, 15 bp, Homo sapiens
cagagggaggagcgt

SEQ ID NO: 1911558 - DNA, 15 bp, Homo sapiens
agagggaggagcgtg

SEQ ID NO: 1911559 - DNA, 15 bp, Homo sapiens
gagggaggagcgtgt

SEQ ID NO: 1911560 - DNA, 15 bp, Homo sapiens
agggaggagcgtgtg

SEQ ID NO: 1911561 - DNA, 15 bp, Homo sapiens
gggaggagcgtgtgg

SEQ ID NO: 1911562 - DNA, 15 bp, Homo sapiens
ggaggagcgtgtggg

SEQ ID NO: 1911563 - DNA, 15 bp, Homo sapiens
gaggagcgtgtgggg

SEQ ID NO: 1911564 - DNA, 15 bp, Homo sapiens
aggagcgtgtggggt

SEQ ID NO: 1911565 - DNA, 15 bp, Homo sapiens
ggagcgtgtggggtt

SEQ ID NO: 1911566 - DNA, 15 bp, Homo sapiens
gagcgtgtggggttg

SEQ ID NO: 1911567 - DNA, 15 bp, Homo sapiens
agcgtgtggggttgg

SEQ ID NO: 1911568 - DNA, 15 bp, Homo sapiens
gcgtgtggggttggg

SEQ ID NO: 1911569 - DNA, 15 bp, Homo sapiens
cgtgtggggttggga

SEQ ID NO: 1911570 - DNA, 15 bp, Homo sapiens
gtgtggggttgggag

SEQ ID NO: 1911571 - DNA, 15 bp, Homo sapiens
tgtggggttgggagc

SEQ ID NO: 1911572 - DNA, 15 bp, Homo sapiens
gtggggttgggagca

SEQ ID NO: 1911573 - DNA, 15 bp, Homo sapiens
tggggttgggagcaa

SEQ ID NO: 1911574 - DNA, 15 bp, Homo sapiens
ggggttgggagcaag

SEQ ID NO: 1911575 - DNA, 15 bp, Homo sapiens
gggttgggagcaagg

SEQ ID NO: 1911576 - DNA, 15 bp, Homo sapiens
ggttgggagcaaggc

SEQ ID NO: 1911577 - DNA, 15 bp, Homo sapiens
gttgggagcaaggcc

SEQ ID NO: 1911578 - DNA, 15 bp, Homo sapiens
ttgggagcaaggcct

SEQ ID NO: 1911579 - DNA, 15 bp, Homo sapiens
tgggagcaaggcctc

SEQ ID NO: 1911580 - DNA, 15 bp, Homo sapiens
gggagcaaggcctca

SEQ ID NO: 1911581 - DNA, 15 bp, Homo sapiens
ggagcaaggcctcac

SEQ ID NO: 1911582 - DNA, 15 bp, Homo sapiens
gagcaaggcctcacc

SEQ ID NO: 1911583 - DNA, 15 bp, Homo sapiens
agcaaggcctcacca

SEQ ID NO: 1911584 - DNA, 15 bp, Homo sapiens
gcaaggcctcaccag

SEQ ID NO: 1911585 - DNA, 15 bp, Homo sapiens
caaggcctcaccaga

SEQ ID NO: 1911586 - DNA, 15 bp, Homo sapiens
aaggcctcaccagaa

SEQ ID NO: 1911587 - DNA, 15 bp, Homo sapiens
aggcctcaccagaac

SEQ ID NO: 1911588 - DNA, 15 bp, Homo sapiens
ggcctcaccagaaca

SEQ ID NO: 1911589 - DNA, 15 bp, Homo sapiens
gcctcaccagaacac

SEQ ID NO: 1911590 - DNA, 15 bp, Homo sapiens
cctcaccagaacaca

SEQ ID NO: 1911591 - DNA, 15 bp, Homo sapiens
ctcaccagaacacag

SEQ ID NO: 1911592 - DNA, 15 bp, Homo sapiens
tcaccagaacacagc

SEQ ID NO: 1911593 - DNA, 15 bp, Homo sapiens
caccagaacacagcc

SEQ ID NO: 1911594 - DNA, 15 bp, Homo sapiens
accagaacacagcca

SEQ ID NO: 1911595 - DNA, 15 bp, Homo sapiens
ccagaacacagccag

SEQ ID NO: 1911596 - DNA, 15 bp, Homo sapiens
cagaacacagccagt

SEQ ID NO: 1911597 - DNA, 15 bp, Homo sapiens
agaacacagccagtt

SEQ ID NO: 1911598 - DNA, 15 bp, Homo sapiens
gaacacagccagtta

SEQ ID NO: 1911599 - DNA, 15 bp, Homo sapiens
aacacagccagttac

SEQ ID NO: 1911600 - DNA, 15 bp, Homo sapiens
acacagccagttacg

SEQ ID NO: 1911601 - DNA, 15 bp, Homo sapiens
cacagccagttacgc

SEQ ID NO: 1911602 - DNA, 15 bp, Homo sapiens
acagccagttacgca

SEQ ID NO: 1911603 - DNA, 15 bp, Homo sapiens
cagccagttacgcaa

SEQ ID NO: 1911604 - DNA, 15 bp, Homo sapiens
agccagttacgcaac

SEQ ID NO: 1911605 - DNA, 15 bp, Homo sapiens
gccagttacgcaaca

SEQ ID NO: 1911606 - DNA, 15 bp, Homo sapiens
ccagttacgcaacag

SEQ ID NO: 1911607 - DNA, 15 bp, Homo sapiens
cagttacgcaacagc

SEQ ID NO: 1911608 - DNA, 15 bp, Homo sapiens
agttacgcaacagcg

SEQ ID NO: 1911609 - DNA, 15 bp, Homo sapiens
gttacgcaacagcgc

SEQ ID NO: 1911610 - DNA, 15 bp, Homo sapiens
ttacgcaacagcgca

SEQ ID NO: 1911611 - DNA, 15 bp, Homo sapiens
tacgcaacagcgcaa

SEQ ID NO: 1911612 - DNA, 15 bp, Homo sapiens
acgcaacagcgcaag

SEQ ID NO: 1911613 - DNA, 15 bp, Homo sapiens
cgcaacagcgcaagg

SEQ ID NO: 1911614 - DNA, 15 bp, Homo sapiens
gcaacagcgcaaggc

SEQ ID NO: 1911615 - DNA, 15 bp, Homo sapiens
caacagcgcaaggcc

SEQ ID NO: 1911616 - DNA, 15 bp, Homo sapiens
aacagcgcaaggcct

SEQ ID NO: 1911617 - DNA, 15 bp, Homo sapiens
acagcgcaaggcctg

SEQ ID NO: 1911618 - DNA, 15 bp, Homo sapiens
cagcgcaaggcctgc

SEQ ID NO: 1911619 - DNA, 15 bp, Homo sapiens
agcgcaaggcctgct

SEQ ID NO: 1911620 - DNA, 15 bp, Homo sapiens
gcgcaaggcctgctc

SEQ ID NO: 1911621 - DNA, 15 bp, Homo sapiens
cgcaaggcctgctcc

SEQ ID NO: 1911622 - DNA, 15 bp, Homo sapiens
gcaaggcctgctcca

SEQ ID NO: 1911623 - DNA, 15 bp, Homo sapiens
caaggcctgctccag

SEQ ID NO: 1911624 - DNA, 15 bp, Homo sapiens
aaggcctgctccagg

SEQ ID NO: 1911625 - DNA, 15 bp, Homo sapiens
aggcctgctccaggc

SEQ ID NO: 1911626 - DNA, 15 bp, Homo sapiens
ggcctgctccaggcc

SEQ ID NO: 1911627 - DNA, 15 bp, Homo sapiens
gcctgctccaggccc

SEQ ID NO: 1911628 - DNA, 15 bp, Homo sapiens
cctgctccaggcccc

SEQ ID NO: 1911629 - DNA, 15 bp, Homo sapiens
ctgctccaggcccca

SEQ ID NO: 1911630 - DNA, 15 bp, Homo sapiens
tgctccaggccccac

SEQ ID NO: 1911631 - DNA, 15 bp, Homo sapiens
gctccaggccccacc

SEQ ID NO: 1911632 - DNA, 15 bp, Homo sapiens
ctccaggccccacct

SEQ ID NO: 1911633 - DNA, 15 bp, Homo sapiens
tccaggccccacctc

SEQ ID NO: 1911634 - DNA, 15 bp, Homo sapiens
ccaggccccacctcc

SEQ ID NO: 1911635 - DNA, 15 bp, Homo sapiens
caggccccacctcca

SEQ ID NO: 1911636 - DNA, 15 bp, Homo sapiens
aggccccacctccag

SEQ ID NO: 1911637 - DNA, 15 bp, Homo sapiens
ggccccacctccagc

SEQ ID NO: 1911638 - DNA, 15 bp, Homo sapiens
gccccacctccagcg

SEQ ID NO: 1911639 - DNA, 15 bp, Homo sapiens
ccccacctccagcgg

SEQ ID NO: 1911640 - DNA, 15 bp, Homo sapiens
cccacctccagcgga

SEQ ID NO: 1911641 - DNA, 15 bp, Homo sapiens
ccacctccagcggag

SEQ ID NO: 1911642 - DNA, 15 bp, Homo sapiens
tccccacggcgcagc

SEQ ID NO: 1911643 - DNA, 15 bp, Homo sapiens
ccccacggcgcagcc

SEQ ID NO: 1911644 - DNA, 15 bp, Homo sapiens
cccacggcgcagccc

SEQ ID NO: 1911645 - DNA, 15 bp, Homo sapiens
ccacggcgcagccca

SEQ ID NO: 1911646 - DNA, 15 bp, Homo sapiens
cacggcgcagcccaa

SEQ ID NO: 1911647 - DNA, 15 bp, Homo sapiens
acggcgcagcccaag

SEQ ID NO: 1911648 - DNA, 15 bp, Homo sapiens
cggcgcagcccaagg

SEQ ID NO: 1911649 - DNA, 15 bp, Homo sapiens
ggcgcagcccaaggc

SEQ ID NO: 1911650 - DNA, 15 bp, Homo sapiens
gcgcagcccaaggct

SEQ ID NO: 1911651 - DNA, 15 bp, Homo sapiens
cgcagcccaaggctt

SEQ ID NO: 1911652 - DNA, 15 bp, Homo sapiens
gcagcccaaggcttt

SEQ ID NO: 1911653 - DNA, 15 bp, Homo sapiens
cagcccaaggctttg

SEQ ID NO: 1911654 - DNA, 15 bp, Homo sapiens
agcccaaggctttgt

SEQ ID NO: 1911655 - DNA, 15 bp, Homo sapiens
gcccaaggctttgtc

SEQ ID NO: 1911656 - DNA, 15 bp, Homo sapiens
cccaaggctttgtct

SEQ ID NO: 1911657 - DNA, 15 bp, Homo sapiens
ccaaggctttgtcta

SEQ ID NO: 1911658 - DNA, 15 bp, Homo sapiens
caaggctttgtctat

SEQ ID NO: 1911659 - DNA, 15 bp, Homo sapiens
aaggctttgtctatg

SEQ ID NO: 1911660 - DNA, 15 bp, Homo sapiens
aggctttgtctatgg

SEQ ID NO: 1911661 - DNA, 15 bp, Homo sapiens
ggctttgtctatggg

SEQ ID NO: 1911662 - DNA, 15 bp, Homo sapiens
gctttgtctatgggc

SEQ ID NO: 1911663 - DNA, 15 bp, Homo sapiens
ctttgtctatgggct

SEQ ID NO: 1911664 - DNA, 15 bp, Homo sapiens
tttgtctatgggctg

SEQ ID NO: 1911665 - DNA, 15 bp, Homo sapiens
ttgtctatgggctgg

SEQ ID NO: 1911666 - DNA, 15 bp, Homo sapiens
tgtctatgggctggg

SEQ ID NO: 1911667 - DNA, 15 bp, Homo sapiens
gtctatgggctgggg

SEQ ID NO: 1911668 - DNA, 15 bp, Homo sapiens
tctatgggctgggga

SEQ ID NO: 1911669 - DNA, 15 bp, Homo sapiens
ctatgggctggggaa

SEQ ID NO: 1911670 - DNA, 15 bp, Homo sapiens
tgggctggggaagag

SEQ ID NO: 1911671 - DNA, 15 bp, Homo sapiens
gggctggggaagagc

SEQ ID NO: 1911672 - DNA, 15 bp, Homo sapiens
ggctggggaagagcc

SEQ ID NO: 1911673 - DNA, 15 bp, Homo sapiens
gctggggaagagccc

SEQ ID NO: 1911674 - DNA, 15 bp, Homo sapiens
ctggggaagagcccg

SEQ ID NO: 1911675 - DNA, 15 bp, Homo sapiens
tggggaagagcccgg

SEQ ID NO: 1911676 - DNA, 15 bp, Homo sapiens
ggggaagagcccggg

SEQ ID NO: 1911677 - DNA, 15 bp, Homo sapiens
gggaagagcccgggg

SEQ ID NO: 1911678 - DNA, 15 bp, Homo sapiens
ggaagagcccggggg

SEQ ID NO: 1911679 - DNA, 15 bp, Homo sapiens
gaagagcccggggga

SEQ ID NO: 1911680 - DNA, 15 bp, Homo sapiens
aagagcccgggggag

SEQ ID NO: 1911681 - DNA, 15 bp, Homo sapiens
agagcccgggggagt

SEQ ID NO: 1911682 - DNA, 15 bp, Homo sapiens
gagcccgggggagtc

SEQ ID NO: 1911683 - DNA, 15 bp, Homo sapiens
agcccgggggagtca

SEQ ID NO: 1911684 - DNA, 15 bp, Homo sapiens
gcccgggggagtcag

SEQ ID NO: 1911685 - DNA, 15 bp, Homo sapiens
cccgggggagtcagc

SEQ ID NO: 1911686 - DNA, 15 bp, Homo sapiens
ccgggggagtcagcc

SEQ ID NO: 1911687 - DNA, 15 bp, Homo sapiens
cgggggagtcagccg

SEQ ID NO: 1911688 - DNA, 15 bp, Homo sapiens
gggggagtcagccgg

SEQ ID NO: 1911689 - DNA, 15 bp, Homo sapiens
ggggagtcagccggc

SEQ ID NO: 1911690 - DNA, 15 bp, Homo sapiens
gggagtcagccggca

SEQ ID NO: 1911691 - DNA, 15 bp, Homo sapiens
ggagtcagccggcag

SEQ ID NO: 1911692 - DNA, 15 bp, Homo sapiens
gagtcagccggcagg

SEQ ID NO: 1911693 - DNA, 15 bp, Homo sapiens
agtcagccggcaggg

SEQ ID NO: 1911694 - DNA, 15 bp, Homo sapiens
gtcagccggcagggt

SEQ ID NO: 1911695 - DNA, 15 bp, Homo sapiens
tcagccggcagggtc

SEQ ID NO: 1911696 - DNA, 15 bp, Homo sapiens
cagccggcagggtcc

SEQ ID NO: 1911697 - DNA, 15 bp, Homo sapiens
agccggcagggtcct

SEQ ID NO: 1911698 - DNA, 15 bp, Homo sapiens
gccggcagggtcctg

SEQ ID NO: 1911699 - DNA, 15 bp, Homo sapiens
ccggcagggtcctgg

SEQ ID NO: 1911700 - DNA, 15 bp, Homo sapiens
cggcagggtcctggg

SEQ ID NO: 1911701 - DNA, 15 bp, Homo sapiens
ggcagggtcctgggg

SEQ ID NO: 1911702 - DNA, 15 bp, Homo sapiens
gcagggtcctggggc

SEQ ID NO: 1911703 - DNA, 15 bp, Homo sapiens
cagggtcctggggca

SEQ ID NO: 1911704 - DNA, 15 bp, Homo sapiens
agggtcctggggcag

SEQ ID NO: 1911705 - DNA, 15 bp, Homo sapiens
gggtcctggggcagt

SEQ ID NO: 1911706 - DNA, 15 bp, Homo sapiens
ggtcctggggcagta

SEQ ID NO: 1911707 - DNA, 15 bp, Homo sapiens
gtcctggggcagtac

SEQ ID NO: 1911708 - DNA, 15 bp, Homo sapiens
tcctggggcagtacc

SEQ ID NO: 1911709 - DNA, 15 bp, Homo sapiens
cctggggcagtaccc

SEQ ID NO: 1911710 - DNA, 15 bp, Homo sapiens
ctggggcagtaccca

SEQ ID NO: 1911711 - DNA, 15 bp, Homo sapiens
tggggcagtacccac

SEQ ID NO: 1911712 - DNA, 15 bp, Homo sapiens
ggggcagtacccacc

SEQ ID NO: 1911713 - DNA, 15 bp, Homo sapiens
gggcagtacccaccc

SEQ ID NO: 1911714 - DNA, 15 bp, Homo sapiens
ggcagtacccaccca

SEQ ID NO: 1911715 - DNA, 15 bp, Homo sapiens
gcagtacccacccag

SEQ ID NO: 1911716 - DNA, 15 bp, Homo sapiens
cagtacccacccagc

SEQ ID NO: 1911717 - DNA, 15 bp, Homo sapiens
agtacccacccagca

SEQ ID NO: 1911718 - DNA, 15 bp, Homo sapiens
gtacccacccagcac

SEQ ID NO: 1911719 - DNA, 15 bp, Homo sapiens
tacccacccagcaca

SEQ ID NO: 1911720 - DNA, 15 bp, Homo sapiens
acccacccagcacag

SEQ ID NO: 1911721 - DNA, 15 bp, Homo sapiens
cccacccagcacagg

SEQ ID NO: 1911722 - DNA, 15 bp, Homo sapiens
ccacccagcacagga

SEQ ID NO: 1911723 - DNA, 15 bp, Homo sapiens
cacccagcacaggag

SEQ ID NO: 1911724 - DNA, 15 bp, Homo sapiens
acccagcacaggagt

SEQ ID NO: 1911725 - DNA, 15 bp, Homo sapiens
cccagcacaggagtg

SEQ ID NO: 1911726 - DNA, 15 bp, Homo sapiens
ccagcacaggagtgt

SEQ ID NO: 1911727 - DNA, 15 bp, Homo sapiens
cagcacaggagtgta

SEQ ID NO: 1911728 - DNA, 15 bp, Homo sapiens
agcacaggagtgtag

SEQ ID NO: 1911729 - DNA, 15 bp, Homo sapiens
gcacaggagtgtagt

SEQ ID NO: 1911730 - DNA, 15 bp, Homo sapiens
cacaggagtgtagta

SEQ ID NO: 1911731 - DNA, 15 bp, Homo sapiens
acaggagtgtagtac

SEQ ID NO: 1911732 - DNA, 15 bp, Homo sapiens
caggagtgtagtact

SEQ ID NO: 1911733 - DNA, 15 bp, Homo sapiens
aggagtgtagtactt

SEQ ID NO: 1911734 - DNA, 15 bp, Homo sapiens
ggagtgtagtacttg

SEQ ID NO: 1911735 - DNA, 15 bp, Homo sapiens
gagtgtagtacttgg

SEQ ID NO: 1911736 - DNA, 15 bp, Homo sapiens
agtgtagtacttgga

SEQ ID NO: 1911737 - DNA, 15 bp, Homo sapiens
gtgtagtacttggag

SEQ ID NO: 1911738 - DNA, 15 bp, Homo sapiens
tgtagtacttggaga

SEQ ID NO: 1911739 - DNA, 15 bp, Homo sapiens
gtagtacttggagaa

SEQ ID NO: 1911740 - DNA, 15 bp, Homo sapiens
tagtacttggagaag

SEQ ID NO: 1911741 - DNA, 15 bp, Homo sapiens
agtacttggagaaga

SEQ ID NO: 1911742 - DNA, 15 bp, Homo sapiens
gtacttggagaagac

SEQ ID NO: 1911743 - DNA, 15 bp, Homo sapiens
tacttggagaagacc

SEQ ID NO: 1911744 - DNA, 15 bp, Homo sapiens
acttggagaagacct

SEQ ID NO: 1911745 - DNA, 15 bp, Homo sapiens
cttggagaagacctc

SEQ ID NO: 1911746 - DNA, 15 bp, Homo sapiens
ttggagaagacctca

SEQ ID NO: 1911747 - DNA, 15 bp, Homo sapiens
tggagaagacctcat

SEQ ID NO: 1911748 - DNA, 15 bp, Homo sapiens
ggagaagacctcatc

SEQ ID NO: 1911749 - DNA, 15 bp, Homo sapiens
gagaagacctcatcc

SEQ ID NO: 1911750 - DNA, 15 bp, Homo sapiens
agaagacctcatcct

SEQ ID NO: 1911751 - DNA, 15 bp, Homo sapiens
gaagacctcatcctt

SEQ ID NO: 1911752 - DNA, 15 bp, Homo sapiens
aagacctcatccttg

SEQ ID NO: 1911753 - DNA, 15 bp, Homo sapiens
agacctcatccttgg

SEQ ID NO: 1911754 - DNA, 15 bp, Homo sapiens
gacctcatccttggg

SEQ ID NO: 1911755 - DNA, 15 bp, Homo sapiens
acctcatccttgggg

SEQ ID NO: 1911756 - DNA, 15 bp, Homo sapiens
cctcatccttggggc

SEQ ID NO: 1911757 - DNA, 15 bp, Homo sapiens
ctcatccttggggcg

SEQ ID NO: 1911758 - DNA, 15 bp, Homo sapiens
tcatccttggggcgg

SEQ ID NO: 1911759 - DNA, 15 bp, Homo sapiens
catccttggggcggt

SEQ ID NO: 1911760 - DNA, 15 bp, Homo sapiens
atccttggggcggtc

SEQ ID NO: 1911761 - DNA, 15 bp, Homo sapiens
tccttggggcggtca

SEQ ID NO: 1911762 - DNA, 15 bp, Homo sapiens
ccttggggcggtcag

SEQ ID NO: 1911763 - DNA, 15 bp, Homo sapiens
cttggggcggtcagg

SEQ ID NO: 1911764 - DNA, 15 bp, Homo sapiens
ttggggcggtcagga

SEQ ID NO: 1911765 - DNA, 15 bp, Homo sapiens
tggggcggtcaggaa

SEQ ID NO: 1911766 - DNA, 15 bp, Homo sapiens
ggggcggtcaggaaa

SEQ ID NO: 1911767 - DNA, 15 bp, Homo sapiens
gggcggtcaggaaac

SEQ ID NO: 1911768 - DNA, 15 bp, Homo sapiens
ggcggtcaggaaaca

SEQ ID NO: 1911769 - DNA, 15 bp, Homo sapiens
gcggtcaggaaacac

SEQ ID NO: 1911770 - DNA, 15 bp, Homo sapiens
cggtcaggaaacaca

SEQ ID NO: 1911771 - DNA, 15 bp, Homo sapiens
ggtcaggaaacacat

SEQ ID NO: 1911772 - DNA, 15 bp, Homo sapiens
gtcaggaaacacata

SEQ ID NO: 1911773 - DNA, 15 bp, Homo sapiens
tcaggaaacacatag

SEQ ID NO: 1911774 - DNA, 15 bp, Homo sapiens
caggaaacacataga

SEQ ID NO: 1911775 - DNA, 15 bp, Homo sapiens
aggaaacacatagat

SEQ ID NO: 1911776 - DNA, 15 bp, Homo sapiens
ggaaacacatagatg

SEQ ID NO: 1911777 - DNA, 15 bp, Homo sapiens
gaaacacatagatga

SEQ ID NO: 1911778 - DNA, 15 bp, Homo sapiens
aaacacatagatgag

SEQ ID NO: 1911779 - DNA, 15 bp, Homo sapiens
aacacatagatgaga

SEQ ID NO: 1911780 - DNA, 15 bp, Homo sapiens
acacatagatgagat

SEQ ID NO: 1911781 - DNA, 15 bp, Homo sapiens
cacatagatgagata

SEQ ID NO: 1911782 - DNA, 15 bp, Homo sapiens
acatagatgagatag

SEQ ID NO: 1911783 - DNA, 15 bp, Homo sapiens
catagatgagatagc

SEQ ID NO: 1911784 - DNA, 15 bp, Homo sapiens
atagatgagatagct

SEQ ID NO: 1911785 - DNA, 15 bp, Homo sapiens
tagatgagatagctc

SEQ ID NO: 1911786 - DNA, 15 bp, Homo sapiens
agatgagatagctca

SEQ ID NO: 1911787 - DNA, 15 bp, Homo sapiens
gatgagatagctcag

SEQ ID NO: 1911788 - DNA, 15 bp, Homo sapiens
atgagatagctcagg

SEQ ID NO: 1911789 - DNA, 15 bp, Homo sapiens
tgagatagctcaggt

SEQ ID NO: 1911790 - DNA, 15 bp, Homo sapiens
gagatagctcaggtc

SEQ ID NO: 1911791 - DNA, 15 bp, Homo sapiens
agatagctcaggtcc

SEQ ID NO: 1911792 - DNA, 15 bp, Homo sapiens
gatagctcaggtccc

SEQ ID NO: 1911793 - DNA, 15 bp, Homo sapiens
atagctcaggtcccc

SEQ ID NO: 1911794 - DNA, 15 bp, Homo sapiens
tagctcaggtccccc

SEQ ID NO: 1911795 - DNA, 15 bp, Homo sapiens
agctcaggtccccca

SEQ ID NO: 1911796 - DNA, 15 bp, Homo sapiens
gctcaggtcccccag

SEQ ID NO: 1911797 - DNA, 15 bp, Homo sapiens
ctcaggtcccccagc

SEQ ID NO: 1911798 - DNA, 15 bp, Homo sapiens
tcaggtcccccagcc

SEQ ID NO: 1911799 - DNA, 15 bp, Homo sapiens
caggtcccccagccg

SEQ ID NO: 1911800 - DNA, 15 bp, Homo sapiens
aggtcccccagccgg

SEQ ID NO: 1911801 - DNA, 15 bp, Homo sapiens
ggtcccccagccggt

SEQ ID NO: 1911802 - DNA, 15 bp, Homo sapiens
gtcccccagccggtc

SEQ ID NO: 1911803 - DNA, 15 bp, Homo sapiens
tcccccagccggtca

SEQ ID NO: 1911804 - DNA, 15 bp, Homo sapiens
cccccagccggtcag

SEQ ID NO: 1911805 - DNA, 15 bp, Homo sapiens
ccccagccggtcagc

SEQ ID NO: 1911806 - DNA, 15 bp, Homo sapiens
cccagccggtcagcc

SEQ ID NO: 1911807 - DNA, 15 bp, Homo sapiens
ccagccggtcagcca

SEQ ID NO: 1911808 - DNA, 15 bp, Homo sapiens
cagccggtcagccag

SEQ ID NO: 1911809 - DNA, 15 bp, Homo sapiens
agccggtcagccagg

SEQ ID NO: 1911810 - DNA, 15 bp, Homo sapiens
gccggtcagccaggg

SEQ ID NO: 1911811 - DNA, 15 bp, Homo sapiens
ccggtcagccaggga

SEQ ID NO: 1911812 - DNA, 15 bp, Homo sapiens
cggtcagccagggac

SEQ ID NO: 1911813 - DNA, 15 bp, Homo sapiens
ggtcagccagggacc

SEQ ID NO: 1911814 - DNA, 15 bp, Homo sapiens
gtcagccagggacct

SEQ ID NO: 1911815 - DNA, 15 bp, Homo sapiens
tcagccagggacctg

SEQ ID NO: 1911816 - DNA, 15 bp, Homo sapiens
cagccagggacctga

SEQ ID NO: 1911817 - DNA, 15 bp, Homo sapiens
agccagggacctgat

SEQ ID NO: 1911818 - DNA, 15 bp, Homo sapiens
gccagggacctgatg

SEQ ID NO: 1911819 - DNA, 15 bp, Homo sapiens
ccagggacctgatgg

SEQ ID NO: 1911820 - DNA, 15 bp, Homo sapiens
cagggacctgatgga

SEQ ID NO: 1911821 - DNA, 15 bp, Homo sapiens
agggacctgatggag

SEQ ID NO: 1911822 - DNA, 15 bp, Homo sapiens
gggacctgatggaga

SEQ ID NO: 1911823 - DNA, 15 bp, Homo sapiens
ggacctgatggagaa

SEQ ID NO: 1911824 - DNA, 15 bp, Homo sapiens
gacctgatggagaaa

SEQ ID NO: 1911825 - DNA, 15 bp, Homo sapiens
acctgatggagaaat

SEQ ID NO: 1911826 - DNA, 15 bp, Homo sapiens
cctgatggagaaatc

SEQ ID NO: 1911827 - DNA, 15 bp, Homo sapiens
ctgatggagaaatcc

SEQ ID NO: 1911828 - DNA, 15 bp, Homo sapiens
tgatggagaaatccc

SEQ ID NO: 1911829 - DNA, 15 bp, Homo sapiens
gatggagaaatcccg

SEQ ID NO: 1911830 - DNA, 15 bp, Homo sapiens
atggagaaatcccgc

SEQ ID NO: 1911831 - DNA, 15 bp, Homo sapiens
tggagaaatcccgcg

SEQ ID NO: 1911832 - DNA, 15 bp, Homo sapiens
ggagaaatcccgcgt

SEQ ID NO: 1911833 - DNA, 15 bp, Homo sapiens
gagaaatcccgcgtg

SEQ ID NO: 1911834 - DNA, 15 bp, Homo sapiens
agaaatcccgcgtgg

SEQ ID NO: 1911835 - DNA, 15 bp, Homo sapiens
gaaatcccgcgtggt

SEQ ID NO: 1911836 - DNA, 15 bp, Homo sapiens
aaatcccgcgtggtg

SEQ ID NO: 1911837 - DNA, 15 bp, Homo sapiens
aatcccgcgtggtga

SEQ ID NO: 1911838 - DNA, 15 bp, Homo sapiens
atcccgcgtggtgaa

SEQ ID NO: 1911839 - DNA, 15 bp, Homo sapiens
tcccgcgtggtgaat

SEQ ID NO: 1911840 - DNA, 15 bp, Homo sapiens
cccgcgtggtgaatg

SEQ ID NO: 1911841 - DNA, 15 bp, Homo sapiens
ccgcgtggtgaatgg

SEQ ID NO: 1911842 - DNA, 15 bp, Homo sapiens
cgcgtggtgaatggt

SEQ ID NO: 1911843 - DNA, 15 bp, Homo sapiens
gcgtggtgaatggtt

SEQ ID NO: 1911844 - DNA, 15 bp, Homo sapiens
cgtggtgaatggttt

SEQ ID NO: 1911845 - DNA, 15 bp, Homo sapiens
gtggtgaatggtttc

SEQ ID NO: 1911846 - DNA, 15 bp, Homo sapiens
tggtgaatggtttca

SEQ ID NO: 1911847 - DNA, 15 bp, Homo sapiens
ggtgaatggtttcag

SEQ ID NO: 1911848 - DNA, 15 bp, Homo sapiens
gtgaatggtttcagg

SEQ ID NO: 1911849 - DNA, 15 bp, Homo sapiens
tgaatggtttcaggt

SEQ ID NO: 1911850 - DNA, 15 bp, Homo sapiens
gaatggtttcaggtt

SEQ ID NO: 1911851 - DNA, 15 bp, Homo sapiens
aatggtttcaggttc

SEQ ID NO: 1911852 - DNA, 15 bp, Homo sapiens
atggtttcaggttcc

SEQ ID NO: 1911853 - DNA, 15 bp, Homo sapiens
tggtttcaggttcca

SEQ ID NO: 1911854 - DNA, 15 bp, Homo sapiens
ggtttcaggttccac

SEQ ID NO: 1911855 - DNA, 15 bp, Homo sapiens
gtttcaggttccaca

SEQ ID NO: 1911856 - DNA, 15 bp, Homo sapiens
tttcaggttccacag

SEQ ID NO: 1911857 - DNA, 15 bp, Homo sapiens
ttcaggttccacagg

SEQ ID NO: 1911858 - DNA, 15 bp, Homo sapiens
tcaggttccacaggt

SEQ ID NO: 1911859 - DNA, 15 bp, Homo sapiens
caggttccacaggtt

SEQ ID NO: 1911860 - DNA, 15 bp, Homo sapiens
aggttccacaggttg

SEQ ID NO: 1911861 - DNA, 15 bp, Homo sapiens
ggttccacaggttgc

SEQ ID NO: 1911862 - DNA, 15 bp, Homo sapiens
gttccacaggttgcg

SEQ ID NO: 1911863 - DNA, 15 bp, Homo sapiens
ttccacaggttgcgt

SEQ ID NO: 1911864 - DNA, 15 bp, Homo sapiens
tccacaggttgcgtt

SEQ ID NO: 1911865 - DNA, 15 bp, Homo sapiens
ccacaggttgcgttc

SEQ ID NO: 1911866 - DNA, 15 bp, Homo sapiens
cacaggttgcgttcc

SEQ ID NO: 1911867 - DNA, 15 bp, Homo sapiens
acaggttgcgttccg

SEQ ID NO: 1911868 - DNA, 15 bp, Homo sapiens
caggttgcgttccgc

SEQ ID NO: 1911869 - DNA, 15 bp, Homo sapiens
aggttgcgttccgct

SEQ ID NO: 1911870 - DNA, 15 bp, Homo sapiens
ggttgcgttccgctg

SEQ ID NO: 1911871 - DNA, 15 bp, Homo sapiens
gttgcgttccgctgt

SEQ ID NO: 1911872 - DNA, 15 bp, Homo sapiens
ttgcgttccgctgtg

SEQ ID NO: 1911873 - DNA, 15 bp, Homo sapiens
tgcgttccgctgtga

SEQ ID NO: 1911874 - DNA, 15 bp, Homo sapiens
gcgttccgctgtgaa

SEQ ID NO: 1911875 - DNA, 15 bp, Homo sapiens
cgttccgctgtgaaa

SEQ ID NO: 1911876 - DNA, 15 bp, Homo sapiens
gttccgctgtgaaaa

SEQ ID NO: 1911877 - DNA, 15 bp, Homo sapiens
ttccgctgtgaaaag

SEQ ID NO: 1911878 - DNA, 15 bp, Homo sapiens
tccgctgtgaaaaga

SEQ ID NO: 1911879 - DNA, 15 bp, Homo sapiens
ccgctgtgaaaagaa

SEQ ID NO: 1911880 - DNA, 15 bp, Homo sapiens
cgctgtgaaaagaac

SEQ ID NO: 1911881 - DNA, 15 bp, Homo sapiens
ctgtgaaaagaacag

SEQ ID NO: 1911882 - DNA, 15 bp, Homo sapiens
tgtgaaaagaacagc

SEQ ID NO: 1911883 - DNA, 15 bp, Homo sapiens
gtgaaaagaacagcc

SEQ ID NO: 1911884 - DNA, 15 bp, Homo sapiens
tgaaaagaacagcct

SEQ ID NO: 1911885 - DNA, 15 bp, Homo sapiens
gaaaagaacagcctc

SEQ ID NO: 1911886 - DNA, 15 bp, Homo sapiens
aaaagaacagcctca

SEQ ID NO: 1911887 - DNA, 15 bp, Homo sapiens
aaagaacagcctcat

SEQ ID NO: 1911888 - DNA, 15 bp, Homo sapiens
aagaacagcctcatt

SEQ ID NO: 1911889 - DNA, 15 bp, Homo sapiens
agaacagcctcattc

SEQ ID NO: 1911890 - DNA, 15 bp, Homo sapiens
gaacagcctcattcc

SEQ ID NO: 1911891 - DNA, 15 bp, Homo sapiens
aacagcctcattccc

SEQ ID NO: 1911892 - DNA, 15 bp, Homo sapiens
acagcctcattccca

SEQ ID NO: 1911893 - DNA, 15 bp, Homo sapiens
cagcctcattcccat

SEQ ID NO: 1911894 - DNA, 15 bp, Homo sapiens
agcctcattcccata

SEQ ID NO: 1911895 - DNA, 15 bp, Homo sapiens
gcctcattcccataa

SEQ ID NO: 1911896 - DNA, 15 bp, Homo sapiens
cctcattcccataat

SEQ ID NO: 1911897 - DNA, 15 bp, Homo sapiens
ctcattcccataatc

SEQ ID NO: 1911898 - DNA, 15 bp, Homo sapiens
tcattcccataatcc

SEQ ID NO: 1911899 - DNA, 15 bp, Homo sapiens
cattcccataatcca

SEQ ID NO: 1911900 - DNA, 15 bp, Homo sapiens
attcccataatccac

SEQ ID NO: 1911901 - DNA, 15 bp, Homo sapiens
ttcccataatccacc

SEQ ID NO: 1911902 - DNA, 15 bp, Homo sapiens
tcccataatccacca

SEQ ID NO: 1911903 - DNA, 15 bp, Homo sapiens
cccataatccaccag

SEQ ID NO: 1911904 - DNA, 15 bp, Homo sapiens
ccataatccaccagc

SEQ ID NO: 1911905 - DNA, 15 bp, Homo sapiens
cataatccaccagca

SEQ ID NO: 1911906 - DNA, 15 bp, Homo sapiens
ataatccaccagcag

SEQ ID NO: 1911907 - DNA, 15 bp, Homo sapiens
taatccaccagcagc

SEQ ID NO: 1911908 - DNA, 15 bp, Homo sapiens
aatccaccagcagca

SEQ ID NO: 1911909 - DNA, 15 bp, Homo sapiens
atccaccagcagcag

SEQ ID NO: 1911910 - DNA, 15 bp, Homo sapiens
tccaccagcagcagg

SEQ ID NO: 1911911 - DNA, 15 bp, Homo sapiens
ccaccagcagcagga

SEQ ID NO: 1911912 - DNA, 15 bp, Homo sapiens
caccagcagcaggag

SEQ ID NO: 1911913 - DNA, 15 bp, Homo sapiens
accagcagcaggagg

SEQ ID NO: 1911914 - DNA, 15 bp, Homo sapiens
ccagcagcaggagga

SEQ ID NO: 1911915 - DNA, 15 bp, Homo sapiens
cagcagcaggaggac

SEQ ID NO: 1911916 - DNA, 15 bp, Homo sapiens
agcagcaggaggacc

SEQ ID NO: 1911917 - DNA, 15 bp, Homo sapiens
gcagcaggaggacca

SEQ ID NO: 1911918 - DNA, 15 bp, Homo sapiens
cagcaggaggaccaa

SEQ ID NO: 1911919 - DNA, 15 bp, Homo sapiens
agcaggaggaccaag

SEQ ID NO: 1911920 - DNA, 15 bp, Homo sapiens
gcaggaggaccaagg

SEQ ID NO: 1911921 - DNA, 15 bp, Homo sapiens
caggaggaccaaggt

SEQ ID NO: 1911922 - DNA, 15 bp, Homo sapiens
aggaggaccaaggtt

SEQ ID NO: 1911923 - DNA, 15 bp, Homo sapiens
ggaggaccaaggttg

SEQ ID NO: 1911924 - DNA, 15 bp, Homo sapiens
gaggaccaaggttgt

SEQ ID NO: 1911925 - DNA, 15 bp, Homo sapiens
aggaccaaggttgtg

SEQ ID NO: 1911926 - DNA, 15 bp, Homo sapiens
ggaccaaggttgtgg

SEQ ID NO: 1911927 - DNA, 15 bp, Homo sapiens
gaccaaggttgtggg

SEQ ID NO: 1911928 - DNA, 15 bp, Homo sapiens
accaaggttgtgggg

SEQ ID NO: 1911929 - DNA, 15 bp, Homo sapiens
ccaaggttgtggggc

SEQ ID NO: 1911930 - DNA, 15 bp, Homo sapiens
caaggttgtggggct

SEQ ID NO: 1911931 - DNA, 15 bp, Homo sapiens
aaggttgtggggctt

SEQ ID NO: 1911932 - DNA, 15 bp, Homo sapiens
aggttgtggggcttt

SEQ ID NO: 1911933 - DNA, 15 bp, Homo sapiens
ggttgtggggcttta

SEQ ID NO: 1911934 - DNA, 15 bp, Homo sapiens
gttgtggggctttag

SEQ ID NO: 1911935 - DNA, 15 bp, Homo sapiens
ttgtggggctttagg

SEQ ID NO: 1911936 - DNA, 15 bp, Homo sapiens
tgtggggctttaggg

SEQ ID NO: 1911937 - DNA, 15 bp, Homo sapiens
gtggggctttagggc

SEQ ID NO: 1911938 - DNA, 15 bp, Homo sapiens
tggggctttagggca

SEQ ID NO: 1911939 - DNA, 15 bp, Homo sapiens
ggggctttagggcag

SEQ ID NO: 1911940 - DNA, 15 bp, Homo sapiens
gggctttagggcagg

SEQ ID NO: 1911941 - DNA, 15 bp, Homo sapiens
ggctttagggcaggc

SEQ ID NO: 1911942 - DNA, 15 bp, Homo sapiens
gctttagggcaggct

SEQ ID NO: 1911943 - DNA, 15 bp, Homo sapiens
ctttagggcaggctt

SEQ ID NO: 1911944 - DNA, 15 bp, Homo sapiens
tttagggcaggcttg

SEQ ID NO: 1911945 - DNA, 15 bp, Homo sapiens
ttagggcaggcttgc

SEQ ID NO: 1911946 - DNA, 15 bp, Homo sapiens
tagggcaggcttgca

SEQ ID NO: 1911947 - DNA, 15 bp, Homo sapiens
agggcaggcttgcaa

SEQ ID NO: 1911948 - DNA, 15 bp, Homo sapiens
gggcaggcttgcaag

SEQ ID NO: 1911949 - DNA, 15 bp, Homo sapiens
ggcaggcttgcaaga

SEQ ID NO: 1911950 - DNA, 15 bp, Homo sapiens
gcaggcttgcaagag

SEQ ID NO: 1911951 - DNA, 15 bp, Homo sapiens
caggcttgcaagaga

SEQ ID NO: 1911952 - DNA, 15 bp, Homo sapiens
aggcttgcaagagaa

SEQ ID NO: 1911953 - DNA, 15 bp, Homo sapiens
ggcttgcaagagaaa

SEQ ID NO: 1911954 - DNA, 15 bp, Homo sapiens
gcttgcaagagaaat

SEQ ID NO: 1911955 - DNA, 15 bp, Homo sapiens
cttgcaagagaaatc

SEQ ID NO: 1911956 - DNA, 15 bp, Homo sapiens
ttgcaagagaaatct

SEQ ID NO: 1911957 - DNA, 15 bp, Homo sapiens
tgcaagagaaatctg

SEQ ID NO: 1911958 - DNA, 15 bp, Homo sapiens
gcaagagaaatctgg

SEQ ID NO: 1911959 - DNA, 15 bp, Homo sapiens
caagagaaatctggg

SEQ ID NO: 1911960 - DNA, 15 bp, Homo sapiens
aagagaaatctgggc

SEQ ID NO: 1911961 - DNA, 15 bp, Homo sapiens
agagaaatctgggct

SEQ ID NO: 1911962 - DNA, 15 bp, Homo sapiens
gagaaatctgggctt

SEQ ID NO: 1911963 - DNA, 15 bp, Homo sapiens
agaaatctgggcttt

SEQ ID NO: 1911964 - DNA, 15 bp, Homo sapiens
gaaatctgggctttt

SEQ ID NO: 1911965 - DNA, 15 bp, Homo sapiens
aaatctgggctttta

SEQ ID NO: 1911966 - DNA, 15 bp, Homo sapiens
aatctgggcttttat

SEQ ID NO: 1911967 - DNA, 15 bp, Homo sapiens
atctgggcttttata

SEQ ID NO: 1911968 - DNA, 15 bp, Homo sapiens
tctgggcttttatat

SEQ ID NO: 1911969 - DNA, 15 bp, Homo sapiens
ctgggcttttatata

SEQ ID NO: 1911970 - DNA, 15 bp, Homo sapiens
tgggcttttatatag

SEQ ID NO: 1911971 - DNA, 15 bp, Homo sapiens
gggcttttatatagt

SEQ ID NO: 1911972 - DNA, 15 bp, Homo sapiens
ggcttttatatagta

SEQ ID NO: 1911973 - DNA, 15 bp, Homo sapiens
gcttttatatagtag

SEQ ID NO: 1911974 - DNA, 15 bp, Homo sapiens
cttttatatagtagc

SEQ ID NO: 1911975 - DNA, 15 bp, Homo sapiens
ttttatatagtagct

SEQ ID NO: 1911976 - DNA, 15 bp, Homo sapiens
tttatatagtagctt

SEQ ID NO: 1911977 - DNA, 15 bp, Homo sapiens
ttatatagtagcttg

SEQ ID NO: 1911978 - DNA, 15 bp, Homo sapiens
tatatagtagcttgc

SEQ ID NO: 1911979 - DNA, 15 bp, Homo sapiens
atatagtagcttgcg

SEQ ID NO: 1911980 - DNA, 15 bp, Homo sapiens
tatagtagcttgcgc

SEQ ID NO: 1911981 - DNA, 15 bp, Homo sapiens
atagtagcttgcgct

SEQ ID NO: 1911982 - DNA, 15 bp, Homo sapiens
tagtagcttgcgctg

SEQ ID NO: 1911983 - DNA, 15 bp, Homo sapiens
agtagcttgcgctgc

SEQ ID NO: 1911984 - DNA, 15 bp, Homo sapiens
gtagcttgcgctgca

SEQ ID NO: 1911985 - DNA, 15 bp, Homo sapiens
tagcttgcgctgcag

SEQ ID NO: 1911986 - DNA, 15 bp, Homo sapiens
agcttgcgctgcagc

SEQ ID NO: 1911987 - DNA, 15 bp, Homo sapiens
gcttgcgctgcagcc

SEQ ID NO: 1911988 - DNA, 15 bp, Homo sapiens
cttgcgctgcagccc

SEQ ID NO: 1911989 - DNA, 15 bp, Homo sapiens
ttgcgctgcagcccc

SEQ ID NO: 1911990 - DNA, 15 bp, Homo sapiens
tgcgctgcagcccca

SEQ ID NO: 1911991 - DNA, 15 bp, Homo sapiens
gcgctgcagccccag

SEQ ID NO: 1911992 - DNA, 15 bp, Homo sapiens
cgctgcagccccagc

SEQ ID NO: 1911993 - DNA, 15 bp, Homo sapiens
gctgcagccccagcc

SEQ ID NO: 1911994 - DNA, 15 bp, Homo sapiens
ctgcagccccagcct

SEQ ID NO: 1911995 - DNA, 15 bp, Homo sapiens
tgcagccccagcctg

SEQ ID NO: 1911996 - DNA, 15 bp, Homo sapiens
gcagccccagcctgt

SEQ ID NO: 1911997 - DNA, 15 bp, Homo sapiens
cagccccagcctgta

SEQ ID NO: 1911998 - DNA, 15 bp, Homo sapiens
agccccagcctgtag

SEQ ID NO: 1911999 - DNA, 15 bp, Homo sapiens
gccccagcctgtagg

SEQ ID NO: 1912000 - DNA, 15 bp, Homo sapiens
ccccagcctgtaggg

SEQ ID NO: 1912001 - DNA, 15 bp, Homo sapiens
cccagcctgtaggga

SEQ ID NO: 1912002 - DNA, 15 bp, Homo sapiens
ccagcctgtagggaa

SEQ ID NO: 1912003 - DNA, 15 bp, Homo sapiens
cagcctgtagggaag

SEQ ID NO: 1912004 - DNA, 15 bp, Homo sapiens
agcctgtagggaaga

SEQ ID NO: 1912005 - DNA, 15 bp, Homo sapiens
gcctgtagggaagaa

SEQ ID NO: 1912006 - DNA, 15 bp, Homo sapiens
cctgtagggaagaaa

SEQ ID NO: 1912007 - DNA, 15 bp, Homo sapiens
ctgtagggaagaaag

SEQ ID NO: 1912008 - DNA, 15 bp, Homo sapiens
tgtagggaagaaagc

SEQ ID NO: 1912009 - DNA, 15 bp, Homo sapiens
gtagggaagaaagcc

SEQ ID NO: 1912010 - DNA, 15 bp, Homo sapiens
tagggaagaaagccg

SEQ ID NO: 1912011 - DNA, 15 bp, Homo sapiens
agggaagaaagccga

SEQ ID NO: 1912012 - DNA, 15 bp, Homo sapiens
gggaagaaagccgat

SEQ ID NO: 1912013 - DNA, 15 bp, Homo sapiens
ggaagaaagccgatg

SEQ ID NO: 1912014 - DNA, 15 bp, Homo sapiens
gaagaaagccgatgc

SEQ ID NO: 1912015 - DNA, 15 bp, Homo sapiens
aagaaagccgatgcg

SEQ ID NO: 1912016 - DNA, 15 bp, Homo sapiens
agaaagccgatgcgg

SEQ ID NO: 1912017 - DNA, 15 bp, Homo sapiens
gaaagccgatgcggg

SEQ ID NO: 1912018 - DNA, 15 bp, Homo sapiens
aaagccgatgcggga

SEQ ID NO: 1912019 - DNA, 15 bp, Homo sapiens
aagccgatgcgggat

SEQ ID NO: 1912020 - DNA, 15 bp, Homo sapiens
agccgatgcgggatg

SEQ ID NO: 1912021 - DNA, 15 bp, Homo sapiens
gccgatgcgggatgt

SEQ ID NO: 1912022 - DNA, 15 bp, Homo sapiens
ccgatgcgggatgtt

SEQ ID NO: 1912023 - DNA, 15 bp, Homo sapiens
cgatgcgggatgttc

SEQ ID NO: 1912024 - DNA, 15 bp, Homo sapiens
gatgcgggatgttct

SEQ ID NO: 1912025 - DNA, 15 bp, Homo sapiens
atgcgggatgttcta

SEQ ID NO: 1912026 - DNA, 15 bp, Homo sapiens
tgcgggatgttctac

SEQ ID NO: 1912027 - DNA, 15 bp, Homo sapiens
gcgggatgttctact

SEQ ID NO: 1912028 - DNA, 15 bp, Homo sapiens
cgggatgttctactc

SEQ ID NO: 1912029 - DNA, 15 bp, Homo sapiens
gggatgttctactca

SEQ ID NO: 1912030 - DNA, 15 bp, Homo sapiens
ggatgttctactcag

SEQ ID NO: 1912031 - DNA, 15 bp, Homo sapiens
gatgttctactcagc

SEQ ID NO: 1912032 - DNA, 15 bp, Homo sapiens
atgttctactcagca

SEQ ID NO: 1912033 - DNA, 15 bp, Homo sapiens
tgttctactcagcaa

SEQ ID NO: 1912034 - DNA, 15 bp, Homo sapiens
gttctactcagcaaa

SEQ ID NO: 1912035 - DNA, 15 bp, Homo sapiens
ttctactcagcaaac

SEQ ID NO: 1912036 - DNA, 15 bp, Homo sapiens
tctactcagcaaacc

SEQ ID NO: 1912037 - DNA, 15 bp, Homo sapiens
ctactcagcaaacca

SEQ ID NO: 1912038 - DNA, 15 bp, Homo sapiens
tactcagcaaaccag

SEQ ID NO: 1912039 - DNA, 15 bp, Homo sapiens
actcagcaaaccaga

SEQ ID NO: 1912040 - DNA, 15 bp, Homo sapiens
ctcagcaaaccagat

SEQ ID NO: 1912041 - DNA, 15 bp, Homo sapiens
tcagcaaaccagatg

SEQ ID NO: 1912042 - DNA, 15 bp, Homo sapiens
cagcaaaccagatga

SEQ ID NO: 1912043 - DNA, 15 bp, Homo sapiens
agcaaaccagatgag

SEQ ID NO: 1912044 - DNA, 15 bp, Homo sapiens
gcaaaccagatgagc

SEQ ID NO: 1912045 - DNA, 15 bp, Homo sapiens
caaaccagatgagca

SEQ ID NO: 1912046 - DNA, 15 bp, Homo sapiens
aaaccagatgagcag

SEQ ID NO: 1912047 - DNA, 15 bp, Homo sapiens
aaccagatgagcaga

SEQ ID NO: 1912048 - DNA, 15 bp, Homo sapiens
accagatgagcagat

SEQ ID NO: 1912049 - DNA, 15 bp, Homo sapiens
ccagatgagcagata

SEQ ID NO: 1912050 - DNA, 15 bp, Homo sapiens
cagatgagcagatac

SEQ ID NO: 1912051 - DNA, 15 bp, Homo sapiens
agatgagcagatacc

SEQ ID NO: 1912052 - DNA, 15 bp, Homo sapiens
gatgagcagatacca

SEQ ID NO: 1912053 - DNA, 15 bp, Homo sapiens
atgagcagataccaa

SEQ ID NO: 1912054 - DNA, 15 bp, Homo sapiens
tgagcagataccaac

SEQ ID NO: 1912055 - DNA, 15 bp, Homo sapiens
gagcagataccaaca

SEQ ID NO: 1912056 - DNA, 15 bp, Homo sapiens
agcagataccaacaa

SEQ ID NO: 1912057 - DNA, 15 bp, Homo sapiens
gcagataccaacaag

SEQ ID NO: 1912058 - DNA, 15 bp, Homo sapiens
cagataccaacaagg

SEQ ID NO: 1912059 - DNA, 15 bp, Homo sapiens
agataccaacaaggc

SEQ ID NO: 1912060 - DNA, 15 bp, Homo sapiens
gataccaacaaggct

SEQ ID NO: 1912061 - DNA, 15 bp, Homo sapiens
ataccaacaaggctg

SEQ ID NO: 1912062 - DNA, 15 bp, Homo sapiens
taccaacaaggctgg

SEQ ID NO: 1912063 - DNA, 15 bp, Homo sapiens
accaacaaggctggg

SEQ ID NO: 1912064 - DNA, 15 bp, Homo sapiens
ccaacaaggctgggt

SEQ ID NO: 1912065 - DNA, 15 bp, Homo sapiens
caacaaggctgggtc

SEQ ID NO: 1912066 - DNA, 15 bp, Homo sapiens
aacaaggctgggtcg

SEQ ID NO: 1912067 - DNA, 15 bp, Homo sapiens
acaaggctgggtcgt

SEQ ID NO: 1912068 - DNA, 15 bp, Homo sapiens
caaggctgggtcgtg

SEQ ID NO: 1912069 - DNA, 15 bp, Homo sapiens
aaggctgggtcgtgg

SEQ ID NO: 1912070 - DNA, 15 bp, Homo sapiens
aggctgggtcgtggc

SEQ ID NO: 1912071 - DNA, 15 bp, Homo sapiens
ggctgggtcgtggca

SEQ ID NO: 1912072 - DNA, 15 bp, Homo sapiens
gctgggtcgtggcag

SEQ ID NO: 1912073 - DNA, 15 bp, Homo sapiens
ctgggtcgtggcaga

SEQ ID NO: 1912074 - DNA, 15 bp, Homo sapiens
tgggtcgtggcagag

SEQ ID NO: 1912075 - DNA, 15 bp, Homo sapiens
gggtcgtggcagaga

SEQ ID NO: 1912076 - DNA, 15 bp, Homo sapiens
ggtcgtggcagagag

SEQ ID NO: 1912077 - DNA, 15 bp, Homo sapiens
gtcgtggcagagagg

SEQ ID NO: 1912078 - DNA, 15 bp, Homo sapiens
tcgtggcagagaggg

SEQ ID NO: 1912079 - DNA, 15 bp, Homo sapiens
cgtggcagagagggg

SEQ ID NO: 1912080 - DNA, 15 bp, Homo sapiens
gtggcagagagggga

SEQ ID NO: 1912081 - DNA, 15 bp, Homo sapiens
tggcagagaggggag

SEQ ID NO: 1912082 - DNA, 15 bp, Homo sapiens
ggcagagaggggaga

SEQ ID NO: 1912083 - DNA, 15 bp, Homo sapiens
gcagagaggggagag

SEQ ID NO: 1912084 - DNA, 15 bp, Homo sapiens
cagagaggggagagc

SEQ ID NO: 1912085 - DNA, 15 bp, Homo sapiens
agagaggggagagcg

SEQ ID NO: 1912086 - DNA, 15 bp, Homo sapiens
gagaggggagagcgt

SEQ ID NO: 1912087 - DNA, 15 bp, Homo sapiens
agaggggagagcgtg

SEQ ID NO: 1912088 - DNA, 15 bp, Homo sapiens
gaggggagagcgtga

SEQ ID NO: 1912089 - DNA, 15 bp, Homo sapiens
aggggagagcgtgaa

SEQ ID NO: 1912090 - DNA, 15 bp, Homo sapiens
ggggagagcgtgaaa

SEQ ID NO: 1912091 - DNA, 15 bp, Homo sapiens
gggagagcgtgaaac

SEQ ID NO: 1912092 - DNA, 15 bp, Homo sapiens
ggagagcgtgaaact

SEQ ID NO: 1912093 - DNA, 15 bp, Homo sapiens
gagagcgtgaaactg

SEQ ID NO: 1912094 - DNA, 15 bp, Homo sapiens
agagcgtgaaactgc

SEQ ID NO: 1912095 - DNA, 15 bp, Homo sapiens
gagcgtgaaactgca

SEQ ID NO: 1912096 - DNA, 15 bp, Homo sapiens
agcgtgaaactgcag

SEQ ID NO: 1912097 - DNA, 15 bp, Homo sapiens
gcgtgaaactgcagg

SEQ ID NO: 1912098 - DNA, 15 bp, Homo sapiens
cgtgaaactgcagga

SEQ ID NO: 1912099 - DNA, 15 bp, Homo sapiens
gtgaaactgcaggag

SEQ ID NO: 1912100 - DNA, 15 bp, Homo sapiens
tgaaactgcaggagg

SEQ ID NO: 1912101 - DNA, 15 bp, Homo sapiens
gaaactgcaggagga

SEQ ID NO: 1912102 - DNA, 15 bp, Homo sapiens
aaactgcaggaggac

SEQ ID NO: 1912103 - DNA, 15 bp, Homo sapiens
aactgcaggaggact

SEQ ID NO: 1912104 - DNA, 15 bp, Homo sapiens
actgcaggaggactc

SEQ ID NO: 1912105 - DNA, 15 bp, Homo sapiens
ctgcaggaggactcg

SEQ ID NO: 1912106 - DNA, 15 bp, Homo sapiens
tgcaggaggactcgc

SEQ ID NO: 1912107 - DNA, 15 bp, Homo sapiens
gcaggaggactcgcc

SEQ ID NO: 1912108 - DNA, 15 bp, Homo sapiens
caggaggactcgccc

SEQ ID NO: 1912109 - DNA, 15 bp, Homo sapiens
aggaggactcgccca

SEQ ID NO: 1912110 - DNA, 15 bp, Homo sapiens
ggaggactcgcccag

SEQ ID NO: 1912111 - DNA, 15 bp, Homo sapiens
gaggactcgcccagc

SEQ ID NO: 1912112 - DNA, 15 bp, Homo sapiens
aggactcgcccagcc

SEQ ID NO: 1912113 - DNA, 15 bp, Homo sapiens
ggactcgcccagccg

SEQ ID NO: 1912114 - DNA, 15 bp, Homo sapiens
gactcgcccagccgt

SEQ ID NO: 1912115 - DNA, 15 bp, Homo sapiens
actcgcccagccgtc

SEQ ID NO: 1912116 - DNA, 15 bp, Homo sapiens
ctcgcccagccgtcc

SEQ ID NO: 1912117 - DNA, 15 bp, Homo sapiens
tcgcccagccgtcct

SEQ ID NO: 1912118 - DNA, 15 bp, Homo sapiens
cgcccagccgtcctg

SEQ ID NO: 1912119 - DNA, 15 bp, Homo sapiens
gcccagccgtcctgg

SEQ ID NO: 1912120 - DNA, 15 bp, Homo sapiens
cccagccgtcctgga

SEQ ID NO: 1912121 - DNA, 15 bp, Homo sapiens
ccagccgtcctggag

SEQ ID NO: 1912122 - DNA, 15 bp, Homo sapiens
cagccgtcctggagt

SEQ ID NO: 1912123 - DNA, 15 bp, Homo sapiens
agccgtcctggagtc

SEQ ID NO: 1912124 - DNA, 15 bp, Homo sapiens
gccgtcctggagtct

SEQ ID NO: 1912125 - DNA, 15 bp, Homo sapiens
ccgtcctggagtcta

SEQ ID NO: 1912126 - DNA, 15 bp, Homo sapiens
cgtcctggagtctat

SEQ ID NO: 1912127 - DNA, 15 bp, Homo sapiens
gtcctggagtctatg

SEQ ID NO: 1912128 - DNA, 15 bp, Homo sapiens
tcctggagtctatgg

SEQ ID NO: 1912129 - DNA, 15 bp, Homo sapiens
cctggagtctatggg

SEQ ID NO: 1912130 - DNA, 15 bp, Homo sapiens
ctggagtctatgggg

SEQ ID NO: 1912131 - DNA, 15 bp, Homo sapiens
tggagtctatggggc

SEQ ID NO: 1912132 - DNA, 15 bp, Homo sapiens
ggagtctatggggct

SEQ ID NO: 1912133 - DNA, 15 bp, Homo sapiens
gagtctatggggctg

SEQ ID NO: 1912134 - DNA, 15 bp, Homo sapiens
agtctatggggctgg

SEQ ID NO: 1912135 - DNA, 15 bp, Homo sapiens
gtctatggggctggg

SEQ ID NO: 1912136 - DNA, 15 bp, Homo sapiens
tctatggggctgggg

SEQ ID NO: 1912137 - DNA, 15 bp, Homo sapiens
ctatggggctgggga

SEQ ID NO: 1912138 - DNA, 15 bp, Homo sapiens
tatggggctggggac

SEQ ID NO: 1912139 - DNA, 15 bp, Homo sapiens
atggggctggggact

SEQ ID NO: 1912140 - DNA, 15 bp, Homo sapiens
tggggctggggactt

SEQ ID NO: 1912141 - DNA, 15 bp, Homo sapiens
ggggctggggacttc

SEQ ID NO: 1912142 - DNA, 15 bp, Homo sapiens
gggctggggacttca

SEQ ID NO: 1912143 - DNA, 15 bp, Homo sapiens
ggctggggacttcag

SEQ ID NO: 1912144 - DNA, 15 bp, Homo sapiens
gctggggacttcagg

SEQ ID NO: 1912145 - DNA, 15 bp, Homo sapiens
ctggggacttcaggt

SEQ ID NO: 1912146 - DNA, 15 bp, Homo sapiens
tggggacttcaggtt

SEQ ID NO: 1912147 - DNA, 15 bp, Homo sapiens
ggggacttcaggttc

SEQ ID NO: 1912148 - DNA, 15 bp, Homo sapiens
gggacttcaggttct

SEQ ID NO: 1912149 - DNA, 15 bp, Homo sapiens
ggacttcaggttctc

SEQ ID NO: 1912150 - DNA, 15 bp, Homo sapiens
gacttcaggttctcc

SEQ ID NO: 1912151 - DNA, 15 bp, Homo sapiens
acttcaggttctcca

SEQ ID NO: 1912152 - DNA, 15 bp, Homo sapiens
cttcaggttctccaa

SEQ ID NO: 1912153 - DNA, 15 bp, Homo sapiens
ttcaggttctccaaa

SEQ ID NO: 1912154 - DNA, 15 bp, Homo sapiens
tcaggttctccaaaa

SEQ ID NO: 1912155 - DNA, 15 bp, Homo sapiens
caggttctccaaaat

SEQ ID NO: 1912156 - DNA, 15 bp, Homo sapiens
aggttctccaaaatg

SEQ ID NO: 1912157 - DNA, 15 bp, Homo sapiens
ggttctccaaaatgg

SEQ ID NO: 1912158 - DNA, 15 bp, Homo sapiens
gttctccaaaatgga

SEQ ID NO: 1912159 - DNA, 15 bp, Homo sapiens
ttctccaaaatggaa

SEQ ID NO: 1912160 - DNA, 15 bp, Homo sapiens
tctccaaaatggaaa

SEQ ID NO: 1912161 - DNA, 15 bp, Homo sapiens
ctccaaaatggaaaa

SEQ ID NO: 1912162 - DNA, 15 bp, Homo sapiens
tccaaaatggaaaac

SEQ ID NO: 1912163 - DNA, 15 bp, Homo sapiens
ccaaaatggaaaaca

SEQ ID NO: 1912164 - DNA, 15 bp, Homo sapiens
caaaatggaaaacaa

SEQ ID NO: 1912165 - DNA, 15 bp, Homo sapiens
aaaatggaaaacaat

SEQ ID NO: 1912166 - DNA, 15 bp, Homo sapiens
aaatggaaaacaata

SEQ ID NO: 1912167 - DNA, 15 bp, Homo sapiens
aatggaaaacaatag

SEQ ID NO: 1912168 - DNA, 15 bp, Homo sapiens
atggaaaacaataga

SEQ ID NO: 1912169 - DNA, 15 bp, Homo sapiens
tggaaaacaatagaa

SEQ ID NO: 1912170 - DNA, 15 bp, Homo sapiens
ggaaaacaatagaaa

SEQ ID NO: 1912171 - DNA, 15 bp, Homo sapiens
gaaaacaatagaaag

SEQ ID NO: 1912172 - DNA, 15 bp, Homo sapiens
aaaacaatagaaaga

SEQ ID NO: 1912173 - DNA, 15 bp, Homo sapiens
aaacaatagaaagag

SEQ ID NO: 1912174 - DNA, 15 bp, Homo sapiens
aacaatagaaagaga

SEQ ID NO: 1912175 - DNA, 15 bp, Homo sapiens
acaatagaaagagaa

SEQ ID NO: 1912176 - DNA, 15 bp, Homo sapiens
caatagaaagagaat

SEQ ID NO: 1912177 - DNA, 15 bp, Homo sapiens
aatagaaagagaata

SEQ ID NO: 1912178 - DNA, 15 bp, Homo sapiens
atagaaagagaatac

SEQ ID NO: 1912179 - DNA, 15 bp, Homo sapiens
tagaaagagaataca

SEQ ID NO: 1912180 - DNA, 15 bp, Homo sapiens
agaaagagaatacat

SEQ ID NO: 1912181 - DNA, 15 bp, Homo sapiens
gaaagagaatacatt

SEQ ID NO: 1912182 - DNA, 15 bp, Homo sapiens
aaagagaatacattt

SEQ ID NO: 1912183 - DNA, 15 bp, Homo sapiens
aagagaatacatttc

SEQ ID NO: 1912184 - DNA, 15 bp, Homo sapiens
agagaatacatttcc

SEQ ID NO: 1912185 - DNA, 15 bp, Homo sapiens
gagaatacatttcca

SEQ ID NO: 1912186 - DNA, 15 bp, Homo sapiens
agaatacatttccaa

SEQ ID NO: 1912187 - DNA, 15 bp, Homo sapiens
gaatacatttccaag

SEQ ID NO: 1912188 - DNA, 15 bp, Homo sapiens
aatacatttccaagc

SEQ ID NO: 1912189 - DNA, 15 bp, Homo sapiens
atacatttccaagcc

SEQ ID NO: 1912190 - DNA, 15 bp, Homo sapiens
tacatttccaagcca

SEQ ID NO: 1912191 - DNA, 15 bp, Homo sapiens
acatttccaagccac

SEQ ID NO: 1912192 - DNA, 15 bp, Homo sapiens
catttccaagccaca

SEQ ID NO: 1912193 - DNA, 15 bp, Homo sapiens
atttccaagccacag

SEQ ID NO: 1912194 - DNA, 15 bp, Homo sapiens
tttccaagccacagc

SEQ ID NO: 1912195 - DNA, 15 bp, Homo sapiens
ttccaagccacagcc

SEQ ID NO: 1912196 - DNA, 15 bp, Homo sapiens
tccaagccacagccc

SEQ ID NO: 1912197 - DNA, 15 bp, Homo sapiens
ccaagccacagccct

SEQ ID NO: 1912198 - DNA, 15 bp, Homo sapiens
caagccacagccctc

SEQ ID NO: 1912199 - DNA, 15 bp, Homo sapiens
aagccacagccctct

SEQ ID NO: 1912200 - DNA, 15 bp, Homo sapiens
agccacagccctctc

SEQ ID NO: 1912201 - DNA, 15 bp, Homo sapiens
gccacagccctctca

SEQ ID NO: 1912202 - DNA, 15 bp, Homo sapiens
ccacagccctctcat

SEQ ID NO: 1912203 - DNA, 15 bp, Homo sapiens
cacagccctctcata

SEQ ID NO: 1912204 - DNA, 15 bp, Homo sapiens
acagccctctcatac

SEQ ID NO: 1912205 - DNA, 15 bp, Homo sapiens
cagccctctcatact

SEQ ID NO: 1912206 - DNA, 15 bp, Homo sapiens
agccctctcatacta

SEQ ID NO: 1912207 - DNA, 15 bp, Homo sapiens
gccctctcatactaa

SEQ ID NO: 1912208 - DNA, 15 bp, Homo sapiens
ccctctcatactaag

SEQ ID NO: 1912209 - DNA, 15 bp, Homo sapiens
cctctcatactaagc

SEQ ID NO: 1912210 - DNA, 15 bp, Homo sapiens
ctctcatactaagct

SEQ ID NO: 1912211 - DNA, 15 bp, Homo sapiens
tctcatactaagctt

SEQ ID NO: 1912212 - DNA, 15 bp, Homo sapiens
ctcatactaagcttc

SEQ ID NO: 1912213 - DNA, 15 bp, Homo sapiens
tcatactaagcttcc

SEQ ID NO: 1912214 - DNA, 15 bp, Homo sapiens
catactaagcttccc

SEQ ID NO: 1912215 - DNA, 15 bp, Homo sapiens
atactaagcttcccg

SEQ ID NO: 1912216 - DNA, 15 bp, Homo sapiens
tactaagcttcccgc

SEQ ID NO: 1912217 - DNA, 15 bp, Homo sapiens
actaagcttcccgct

SEQ ID NO: 1912218 - DNA, 15 bp, Homo sapiens
ctaagcttcccgctg

SEQ ID NO: 1912219 - DNA, 15 bp, Homo sapiens
taagcttcccgctgg

SEQ ID NO: 1912220 - DNA, 15 bp, Homo sapiens
aagcttcccgctggg

SEQ ID NO: 1912221 - DNA, 15 bp, Homo sapiens
agcttcccgctgggt

SEQ ID NO: 1912222 - DNA, 15 bp, Homo sapiens
gcttcccgctgggta

SEQ ID NO: 1912223 - DNA, 15 bp, Homo sapiens
cttcccgctgggtac

SEQ ID NO: 1912224 - DNA, 15 bp, Homo sapiens
ttcccgctgggtacc

SEQ ID NO: 1912225 - DNA, 15 bp, Homo sapiens
tcccgctgggtacct

SEQ ID NO: 1912226 - DNA, 15 bp, Homo sapiens
cccgctgggtacctt

SEQ ID NO: 1912227 - DNA, 15 bp, Homo sapiens
ccgctgggtaccttc

SEQ ID NO: 1912228 - DNA, 15 bp, Homo sapiens
cgctgggtaccttct

SEQ ID NO: 1912229 - DNA, 15 bp, Homo sapiens
gctgggtaccttcta

SEQ ID NO: 1912230 - DNA, 15 bp, Homo sapiens
ctgggtaccttctaa

SEQ ID NO: 1912231 - DNA, 15 bp, Homo sapiens
tgggtaccttctaag

SEQ ID NO: 1912232 - DNA, 15 bp, Homo sapiens
gggtaccttctaagg

SEQ ID NO: 1912233 - DNA, 15 bp, Homo sapiens
ggtaccttctaagga

SEQ ID NO: 1912234 - DNA, 15 bp, Homo sapiens
gtaccttctaaggac

SEQ ID NO: 1912235 - DNA, 15 bp, Homo sapiens
taccttctaaggaca

SEQ ID NO: 1912236 - DNA, 15 bp, Homo sapiens
accttctaaggacac

SEQ ID NO: 1912237 - DNA, 15 bp, Homo sapiens
ccttctaaggacaca

SEQ ID NO: 1912238 - DNA, 15 bp, Homo sapiens
cttctaaggacacag

SEQ ID NO: 1912239 - DNA, 15 bp, Homo sapiens
ttctaaggacacagg

SEQ ID NO: 1912240 - DNA, 15 bp, Homo sapiens
tctaaggacacaggc

SEQ ID NO: 1912241 - DNA, 15 bp, Homo sapiens
ctaaggacacaggcc

SEQ ID NO: 1912242 - DNA, 15 bp, Homo sapiens
taaggacacaggccc

SEQ ID NO: 1912243 - DNA, 15 bp, Homo sapiens
aaggacacaggcccg

SEQ ID NO: 1912244 - DNA, 15 bp, Homo sapiens
aggacacaggcccga

SEQ ID NO: 1912245 - DNA, 15 bp, Homo sapiens
ggacacaggcccgat

SEQ ID NO: 1912246 - DNA, 15 bp, Homo sapiens
gacacaggcccgatg

SEQ ID NO: 1912247 - DNA, 15 bp, Homo sapiens
acacaggcccgatgg

SEQ ID NO: 1912248 - DNA, 15 bp, Homo sapiens
cacaggcccgatgga

SEQ ID NO: 1912249 - DNA, 15 bp, Homo sapiens
acaggcccgatggag

SEQ ID NO: 1912250 - DNA, 15 bp, Homo sapiens
caggcccgatggagg

SEQ ID NO: 1912251 - DNA, 15 bp, Homo sapiens
aggcccgatggaggg

SEQ ID NO: 1912252 - DNA, 15 bp, Homo sapiens
ggcccgatggagggt

SEQ ID NO: 1912253 - DNA, 15 bp, Homo sapiens
gcccgatggagggtg

SEQ ID NO: 1912254 - DNA, 15 bp, Homo sapiens
cccgatggagggtgg

SEQ ID NO: 1912255 - DNA, 15 bp, Homo sapiens
ccgatggagggtggg

SEQ ID NO: 1912256 - DNA, 15 bp, Homo sapiens
cgatggagggtgggg

SEQ ID NO: 1912257 - DNA, 15 bp, Homo sapiens
gatggagggtggggt

SEQ ID NO: 1912258 - DNA, 15 bp, Homo sapiens
atggagggtggggtg

SEQ ID NO: 1912259 - DNA, 15 bp, Homo sapiens
tggagggtggggtgg

SEQ ID NO: 1912260 - DNA, 15 bp, Homo sapiens
ggagggtggggtggc

SEQ ID NO: 1912261 - DNA, 15 bp, Homo sapiens
gagggtggggtggcg

SEQ ID NO: 1912262 - DNA, 15 bp, Homo sapiens
agggtggggtggcgg

SEQ ID NO: 1912263 - DNA, 15 bp, Homo sapiens
gggtggggtggcggg

SEQ ID NO: 1912264 - DNA, 15 bp, Homo sapiens
ggtggggtggcgggg

SEQ ID NO: 1912265 - DNA, 15 bp, Homo sapiens
gtggggtggcggggc

SEQ ID NO: 1912266 - DNA, 15 bp, Homo sapiens
tggggtggcggggca

SEQ ID NO: 1912267 - DNA, 15 bp, Homo sapiens
ggggtggcggggcaa

SEQ ID NO: 1912268 - DNA, 15 bp, Homo sapiens
gggtggcggggcaag

SEQ ID NO: 1912269 - DNA, 15 bp, Homo sapiens
ggtggcggggcaagg

SEQ ID NO: 1912270 - DNA, 15 bp, Homo sapiens
gtggcggggcaaggg

SEQ ID NO: 1912271 - DNA, 15 bp, Homo sapiens
tggcggggcaaggga

SEQ ID NO: 1912272 - DNA, 15 bp, Homo sapiens
ggcggggcaagggaa

SEQ ID NO: 1912273 - DNA, 15 bp, Homo sapiens
gcggggcaagggaac

SEQ ID NO: 1912274 - DNA, 15 bp, Homo sapiens
cggggcaagggaaca

SEQ ID NO: 1912275 - DNA, 15 bp, Homo sapiens
ggggcaagggaacaa

SEQ ID NO: 1912276 - DNA, 15 bp, Homo sapiens
gggcaagggaacaag

SEQ ID NO: 1912277 - DNA, 15 bp, Homo sapiens
ggcaagggaacaaga

SEQ ID NO: 1912278 - DNA, 15 bp, Homo sapiens
gcaagggaacaagag

SEQ ID NO: 1912279 - DNA, 15 bp, Homo sapiens
caagggaacaagaga

SEQ ID NO: 1912280 - DNA, 15 bp, Homo sapiens
aagggaacaagagac

SEQ ID NO: 1912281 - DNA, 15 bp, Homo sapiens
agggaacaagagacc

SEQ ID NO: 1912282 - DNA, 15 bp, Homo sapiens
gggaacaagagaccg

SEQ ID NO: 1912283 - DNA, 15 bp, Homo sapiens
ggaacaagagaccgg

SEQ ID NO: 1912284 - DNA, 15 bp, Homo sapiens
gaacaagagaccggg

SEQ ID NO: 1912285 - DNA, 15 bp, Homo sapiens
aacaagagaccgggc

SEQ ID NO: 1912286 - DNA, 15 bp, Homo sapiens
acaagagaccgggcc

SEQ ID NO: 1912287 - DNA, 15 bp, Homo sapiens
caagagaccgggcct

SEQ ID NO: 1912288 - DNA, 15 bp, Homo sapiens
aagagaccgggcctt

SEQ ID NO: 1912289 - DNA, 15 bp, Homo sapiens
agagaccgggccttg

SEQ ID NO: 1912290 - DNA, 15 bp, Homo sapiens
gagaccgggccttgg

SEQ ID NO: 1912291 - DNA, 15 bp, Homo sapiens
agaccgggccttggg

SEQ ID NO: 1912292 - DNA, 15 bp, Homo sapiens
gaccgggccttgggg

SEQ ID NO: 1912293 - DNA, 15 bp, Homo sapiens
accgggccttggggc

SEQ ID NO: 1912294 - DNA, 15 bp, Homo sapiens
ccgggccttggggct

SEQ ID NO: 1912295 - DNA, 15 bp, Homo sapiens
cgggccttggggctg

SEQ ID NO: 1912296 - DNA, 15 bp, Homo sapiens
gggccttggggctgg

SEQ ID NO: 1912297 - DNA, 15 bp, Homo sapiens
ggccttggggctgga

SEQ ID NO: 1912298 - DNA, 15 bp, Homo sapiens
gccttggggctggag

SEQ ID NO: 1912299 - DNA, 15 bp, Homo sapiens
ccttggggctggagt

SEQ ID NO: 1912300 - DNA, 15 bp, Homo sapiens
cttggggctggagtg

SEQ ID NO: 1912301 - DNA, 15 bp, Homo sapiens
ttggggctggagtgt

SEQ ID NO: 1912302 - DNA, 15 bp, Homo sapiens
tggggctggagtgtg

SEQ ID NO: 1912303 - DNA, 15 bp, Homo sapiens
ggggctggagtgtgg

SEQ ID NO: 1912304 - DNA, 15 bp, Homo sapiens
gggctggagtgtggg

SEQ ID NO: 1912305 - DNA, 15 bp, Homo sapiens
ggctggagtgtgggc

SEQ ID NO: 1912306 - DNA, 15 bp, Homo sapiens
gctggagtgtgggca

SEQ ID NO: 1912307 - DNA, 15 bp, Homo sapiens
ctggagtgtgggcaa

SEQ ID NO: 1912308 - DNA, 15 bp, Homo sapiens
tggagtgtgggcaaa

SEQ ID NO: 1912309 - DNA, 15 bp, Homo sapiens
ggagtgtgggcaaaa

SEQ ID NO: 1912310 - DNA, 15 bp, Homo sapiens
gagtgtgggcaaaac

SEQ ID NO: 1912311 - DNA, 15 bp, Homo sapiens
agtgtgggcaaaacg

SEQ ID NO: 1912312 - DNA, 15 bp, Homo sapiens
gtgtgggcaaaacgg

SEQ ID NO: 1912313 - DNA, 15 bp, Homo sapiens
tgtgggcaaaacggg

SEQ ID NO: 1912314 - DNA, 15 bp, Homo sapiens
gtgggcaaaacgggc

SEQ ID NO: 1912315 - DNA, 15 bp, Homo sapiens
tgggcaaaacgggca

SEQ ID NO: 1912316 - DNA, 15 bp, Homo sapiens
gggcaaaacgggcac

SEQ ID NO: 1912317 - DNA, 15 bp, Homo sapiens
ggcaaaacgggcact

SEQ ID NO: 1912318 - DNA, 15 bp, Homo sapiens
gcaaaacgggcactc

SEQ ID NO: 1912319 - DNA, 15 bp, Homo sapiens
caaaacgggcactca

SEQ ID NO: 1912320 - DNA, 15 bp, Homo sapiens
aaaacgggcactcac

SEQ ID NO: 1912321 - DNA, 15 bp, Homo sapiens
aaacgggcactcacg

SEQ ID NO: 1912322 - DNA, 15 bp, Homo sapiens
aacgggcactcacgg

SEQ ID NO: 1912323 - DNA, 15 bp, Homo sapiens
acgggcactcacggg

SEQ ID NO: 1912324 - DNA, 15 bp, Homo sapiens
cgggcactcacggga

SEQ ID NO: 1912325 - DNA, 15 bp, Homo sapiens
gggcactcacgggag

SEQ ID NO: 1912326 - DNA, 15 bp, Homo sapiens
ggcactcacgggagt

SEQ ID NO: 1912327 - DNA, 15 bp, Homo sapiens
gcactcacgggagtc

SEQ ID NO: 1912328 - DNA, 15 bp, Homo sapiens
cactcacgggagtca

SEQ ID NO: 1912329 - DNA, 15 bp, Homo sapiens
actcacgggagtcaa

SEQ ID NO: 1912330 - DNA, 15 bp, Homo sapiens
ctcacgggagtcaaa

SEQ ID NO: 1912331 - DNA, 15 bp, Homo sapiens
tcacgggagtcaaac

SEQ ID NO: 1912332 - DNA, 15 bp, Homo sapiens
cacgggagtcaaact

SEQ ID NO: 1912333 - DNA, 15 bp, Homo sapiens
acgggagtcaaactt

SEQ ID NO: 1912334 - DNA, 15 bp, Homo sapiens
cgggagtcaaacttc

SEQ ID NO: 1912335 - DNA, 15 bp, Homo sapiens
gggagtcaaacttcc

SEQ ID NO: 1912336 - DNA, 15 bp, Homo sapiens
ggagtcaaacttcca

SEQ ID NO: 1912337 - DNA, 15 bp, Homo sapiens
gagtcaaacttccag

SEQ ID NO: 1912338 - DNA, 15 bp, Homo sapiens
agtcaaacttccagg

SEQ ID NO: 1912339 - DNA, 15 bp, Homo sapiens
gtcaaacttccaggc

SEQ ID NO: 1912340 - DNA, 15 bp, Homo sapiens
tcaaacttccaggcg

SEQ ID NO: 1912341 - DNA, 15 bp, Homo sapiens
caaacttccaggcga

SEQ ID NO: 1912342 - DNA, 15 bp, Homo sapiens
aaacttccaggcgat

SEQ ID NO: 1912343 - DNA, 15 bp, Homo sapiens
aacttccaggcgatg

SEQ ID NO: 1912344 - DNA, 15 bp, Homo sapiens
acttccaggcgatgg

SEQ ID NO: 1912345 - DNA, 15 bp, Homo sapiens
cttccaggcgatggt

SEQ ID NO: 1912346 - DNA, 15 bp, Homo sapiens
ttccaggcgatggtg

SEQ ID NO: 1912347 - DNA, 15 bp, Homo sapiens
tccaggcgatggtga

SEQ ID NO: 1912348 - DNA, 15 bp, Homo sapiens
ccaggcgatggtgat

SEQ ID NO: 1912349 - DNA, 15 bp, Homo sapiens
caggcgatggtgatg

SEQ ID NO: 1912350 - DNA, 15 bp, Homo sapiens
aggcgatggtgatgc

SEQ ID NO: 1912351 - DNA, 15 bp, Homo sapiens
ggcgatggtgatgcc

SEQ ID NO: 1912352 - DNA, 15 bp, Homo sapiens
gcgatggtgatgccc

SEQ ID NO: 1912353 - DNA, 15 bp, Homo sapiens
cgatggtgatgcccc

SEQ ID NO: 1912354 - DNA, 15 bp, Homo sapiens
gatggtgatgccccc

SEQ ID NO: 1912355 - DNA, 15 bp, Homo sapiens
atggtgatgcccccg

SEQ ID NO: 1912356 - DNA, 15 bp, Homo sapiens
tggtgatgcccccga

SEQ ID NO: 1912357 - DNA, 15 bp, Homo sapiens
ggtgatgcccccgat

SEQ ID NO: 1912358 - DNA, 15 bp, Homo sapiens
gtgatgcccccgatt

SEQ ID NO: 1912359 - DNA, 15 bp, Homo sapiens
tgatgcccccgattt

SEQ ID NO: 1912360 - DNA, 15 bp, Homo sapiens
gatgcccccgatttc

SEQ ID NO: 1912361 - DNA, 15 bp, Homo sapiens
atgcccccgatttct

SEQ ID NO: 1912362 - DNA, 15 bp, Homo sapiens
tgcccccgatttctg

SEQ ID NO: 1912363 - DNA, 15 bp, Homo sapiens
gcccccgatttctga

SEQ ID NO: 1912364 - DNA, 15 bp, Homo sapiens
cccccgatttctgag

SEQ ID NO: 1912365 - DNA, 15 bp, Homo sapiens
ccccgatttctgagt

SEQ ID NO: 1912366 - DNA, 15 bp, Homo sapiens
cccgatttctgagtc

SEQ ID NO: 1912367 - DNA, 15 bp, Homo sapiens
ccgatttctgagtca

SEQ ID NO: 1912368 - DNA, 15 bp, Homo sapiens
cgatttctgagtcac

SEQ ID NO: 1912369 - DNA, 15 bp, Homo sapiens
gatttctgagtcact

SEQ ID NO: 1912370 - DNA, 15 bp, Homo sapiens
atttctgagtcacta

SEQ ID NO: 1912371 - DNA, 15 bp, Homo sapiens
tttctgagtcactaa

SEQ ID NO: 1912372 - DNA, 15 bp, Homo sapiens
ttctgagtcactaaa

SEQ ID NO: 1912373 - DNA, 15 bp, Homo sapiens
tctgagtcactaaag

SEQ ID NO: 1912374 - DNA, 15 bp, Homo sapiens
ctgagtcactaaagc

SEQ ID NO: 1912375 - DNA, 15 bp, Homo sapiens
tgagtcactaaagcg

SEQ ID NO: 1912376 - DNA, 15 bp, Homo sapiens
gagtcactaaagcgc

SEQ ID NO: 1912377 - DNA, 15 bp, Homo sapiens
agtcactaaagcgca

SEQ ID NO: 1912378 - DNA, 15 bp, Homo sapiens
gtcactaaagcgcaa

SEQ ID NO: 1912379 - DNA, 15 bp, Homo sapiens
tcactaaagcgcaac

SEQ ID NO: 1912380 - DNA, 15 bp, Homo sapiens
cactaaagcgcaaca

SEQ ID NO: 1912381 - DNA, 15 bp, Homo sapiens
actaaagcgcaacaa

SEQ ID NO: 1912382 - DNA, 15 bp, Homo sapiens
ctaaagcgcaacaag

SEQ ID NO: 1912383 - DNA, 15 bp, Homo sapiens
taaagcgcaacaaga

SEQ ID NO: 1912384 - DNA, 15 bp, Homo sapiens
aaagcgcaacaagaa

SEQ ID NO: 1912385 - DNA, 15 bp, Homo sapiens
aagcgcaacaagaag

SEQ ID NO: 1912386 - DNA, 15 bp, Homo sapiens
agcgcaacaagaagg

SEQ ID NO: 1912387 - DNA, 15 bp, Homo sapiens
gcgcaacaagaaggt

SEQ ID NO: 1912388 - DNA, 15 bp, Homo sapiens
cgcaacaagaaggtc

SEQ ID NO: 1912389 - DNA, 15 bp, Homo sapiens
gcaacaagaaggtcc

SEQ ID NO: 1912390 - DNA, 15 bp, Homo sapiens
caacaagaaggtccc

SEQ ID NO: 1912391 - DNA, 15 bp, Homo sapiens
aacaagaaggtcccg

SEQ ID NO: 1912392 - DNA, 15 bp, Homo sapiens
acaagaaggtcccgt

SEQ ID NO: 1912393 - DNA, 15 bp, Homo sapiens
caagaaggtcccgtc

SEQ ID NO: 1912394 - DNA, 15 bp, Homo sapiens
aagaaggtcccgtcg

SEQ ID NO: 1912395 - DNA, 15 bp, Homo sapiens
agaaggtcccgtcgg

SEQ ID NO: 1912396 - DNA, 15 bp, Homo sapiens
gaaggtcccgtcggg

SEQ ID NO: 1912397 - DNA, 15 bp, Homo sapiens
aaggtcccgtcgggc

SEQ ID NO: 1912398 - DNA, 15 bp, Homo sapiens
aggtcccgtcgggct

SEQ ID NO: 1912399 - DNA, 15 bp, Homo sapiens
ggtcccgtcgggctt

SEQ ID NO: 1912400 - DNA, 15 bp, Homo sapiens
gtcccgtcgggcttg

SEQ ID NO: 1912401 - DNA, 15 bp, Homo sapiens
tcccgtcgggcttgt

SEQ ID NO: 1912402 - DNA, 15 bp, Homo sapiens
cccgtcgggcttgtt

SEQ ID NO: 1912403 - DNA, 15 bp, Homo sapiens
ccgtcgggcttgttg

SEQ ID NO: 1912404 - DNA, 15 bp, Homo sapiens
cgtcgggcttgttga

SEQ ID NO: 1912405 - DNA, 15 bp, Homo sapiens
gtcgggcttgttgat

SEQ ID NO: 1912406 - DNA, 15 bp, Homo sapiens
tcgggcttgttgatg

SEQ ID NO: 1912407 - DNA, 15 bp, Homo sapiens
cgggcttgttgatga

SEQ ID NO: 1912408 - DNA, 15 bp, Homo sapiens
gggcttgttgatgag

SEQ ID NO: 1912409 - DNA, 15 bp, Homo sapiens
ggcttgttgatgagc

SEQ ID NO: 1912410 - DNA, 15 bp, Homo sapiens
gcttgttgatgagca

SEQ ID NO: 1912411 - DNA, 15 bp, Homo sapiens
cttgttgatgagcag

SEQ ID NO: 1912412 - DNA, 15 bp, Homo sapiens
ttgttgatgagcagg

SEQ ID NO: 1912413 - DNA, 15 bp, Homo sapiens
tgttgatgagcaggt

SEQ ID NO: 1912414 - DNA, 15 bp, Homo sapiens
gttgatgagcaggtc

SEQ ID NO: 1912415 - DNA, 15 bp, Homo sapiens
ttgatgagcaggtcg

SEQ ID NO: 1912416 - DNA, 15 bp, Homo sapiens
tgatgagcaggtcgt

SEQ ID NO: 1912417 - DNA, 15 bp, Homo sapiens
gatgagcaggtcgtg

SEQ ID NO: 1912418 - DNA, 15 bp, Homo sapiens
atgagcaggtcgtgg

SEQ ID NO: 1912419 - DNA, 15 bp, Homo sapiens
tgagcaggtcgtggg

SEQ ID NO: 1912420 - DNA, 15 bp, Homo sapiens
gagcaggtcgtgggc

SEQ ID NO: 1912421 - DNA, 15 bp, Homo sapiens
agcaggtcgtgggcc

SEQ ID NO: 1912422 - DNA, 15 bp, Homo sapiens
gcaggtcgtgggcct

SEQ ID NO: 1912423 - DNA, 15 bp, Homo sapiens
caggtcgtgggcctg

SEQ ID NO: 1912424 - DNA, 15 bp, Homo sapiens
aggtcgtgggcctgt

SEQ ID NO: 1912425 - DNA, 15 bp, Homo sapiens
ggtcgtgggcctgtt

SEQ ID NO: 1912426 - DNA, 15 bp, Homo sapiens
gtcgtgggcctgttg

SEQ ID NO: 1912427 - DNA, 15 bp, Homo sapiens
tcgtgggcctgttgc

SEQ ID NO: 1912428 - DNA, 15 bp, Homo sapiens
cgtgggcctgttgct

SEQ ID NO: 1912429 - DNA, 15 bp, Homo sapiens
gtgggcctgttgctt

SEQ ID NO: 1912430 - DNA, 15 bp, Homo sapiens
tgggcctgttgctta

SEQ ID NO: 1912431 - DNA, 15 bp, Homo sapiens
gggcctgttgcttat

SEQ ID NO: 1912432 - DNA, 15 bp, Homo sapiens
ggcctgttgcttatt

SEQ ID NO: 1912433 - DNA, 15 bp, Homo sapiens
gcctgttgcttattc

SEQ ID NO: 1912434 - DNA, 15 bp, Homo sapiens
cctgttgcttattca

SEQ ID NO: 1912435 - DNA, 15 bp, Homo sapiens
ctgttgcttattcac

SEQ ID NO: 1912436 - DNA, 15 bp, Homo sapiens
tgttgcttattcaca

SEQ ID NO: 1912437 - DNA, 15 bp, Homo sapiens
gttgcttattcacaa

SEQ ID NO: 1912438 - DNA, 15 bp, Homo sapiens
ttgcttattcacaaa

SEQ ID NO: 1912439 - DNA, 15 bp, Homo sapiens
tgcttattcacaaaa

SEQ ID NO: 1912440 - DNA, 15 bp, Homo sapiens
gcttattcacaaaac

SEQ ID NO: 1912441 - DNA, 15 bp, Homo sapiens
cttattcacaaaacc

SEQ ID NO: 1912442 - DNA, 15 bp, Homo sapiens
ttattcacaaaacct

SEQ ID NO: 1912443 - DNA, 15 bp, Homo sapiens
tattcacaaaaccta

SEQ ID NO: 1912444 - DNA, 15 bp, Homo sapiens
attcacaaaacctag

SEQ ID NO: 1912445 - DNA, 15 bp, Homo sapiens
ttcacaaaacctagg

SEQ ID NO: 1912446 - DNA, 15 bp, Homo sapiens
tcacaaaacctagga

SEQ ID NO: 1912447 - DNA, 15 bp, Homo sapiens
cacaaaacctaggat

SEQ ID NO: 1912448 - DNA, 15 bp, Homo sapiens
acaaaacctaggatg

SEQ ID NO: 1912449 - DNA, 15 bp, Homo sapiens
caaaacctaggatgg

SEQ ID NO: 1912450 - DNA, 15 bp, Homo sapiens
aaaacctaggatggc

SEQ ID NO: 1912451 - DNA, 15 bp, Homo sapiens
aaacctaggatggcc

SEQ ID NO: 1912452 - DNA, 15 bp, Homo sapiens
aacctaggatggccc

SEQ ID NO: 1912453 - DNA, 15 bp, Homo sapiens
acctaggatggccct

SEQ ID NO: 1912454 - DNA, 15 bp, Homo sapiens
cctaggatggccctg

SEQ ID NO: 1912455 - DNA, 15 bp, Homo sapiens
ctaggatggccctgg

SEQ ID NO: 1912456 - DNA, 15 bp, Homo sapiens
taggatggccctggg

SEQ ID NO: 1912457 - DNA, 15 bp, Homo sapiens
aggatggccctgggt

SEQ ID NO: 1912458 - DNA, 15 bp, Homo sapiens
ggatggccctgggtg

SEQ ID NO: 1912459 - DNA, 15 bp, Homo sapiens
gatggccctgggtgc

SEQ ID NO: 1912460 - DNA, 15 bp, Homo sapiens
atggccctgggtgca

SEQ ID NO: 1912461 - DNA, 15 bp, Homo sapiens
tggccctgggtgcac

SEQ ID NO: 1912462 - DNA, 15 bp, Homo sapiens
ggccctgggtgcacg

SEQ ID NO: 1912463 - DNA, 15 bp, Homo sapiens
gccctgggtgcacgg

SEQ ID NO: 1912464 - DNA, 15 bp, Homo sapiens
ccctgggtgcacgga

SEQ ID NO: 1912465 - DNA, 15 bp, Homo sapiens
cctgggtgcacggag

SEQ ID NO: 1912466 - DNA, 15 bp, Homo sapiens
ctgggtgcacggagc

SEQ ID NO: 1912467 - DNA, 15 bp, Homo sapiens
tgggtgcacggagca

SEQ ID NO: 1912468 - DNA, 15 bp, Homo sapiens
gggtgcacggagcat

SEQ ID NO: 1912469 - DNA, 15 bp, Homo sapiens
ggtgcacggagcatt

SEQ ID NO: 1912470 - DNA, 15 bp, Homo sapiens
gtgcacggagcattg

SEQ ID NO: 1912471 - DNA, 15 bp, Homo sapiens
tgcacggagcattga

SEQ ID NO: 1912472 - DNA, 15 bp, Homo sapiens
gcacggagcattgag

SEQ ID NO: 1912473 - DNA, 15 bp, Homo sapiens
cacggagcattgagc

SEQ ID NO: 1912474 - DNA, 15 bp, Homo sapiens
acggagcattgagcg

SEQ ID NO: 1912475 - DNA, 15 bp, Homo sapiens
cggagcattgagcgt

SEQ ID NO: 1912476 - DNA, 15 bp, Homo sapiens
ggagcattgagcgtc

SEQ ID NO: 1912477 - DNA, 15 bp, Homo sapiens
gagcattgagcgtca

SEQ ID NO: 1912478 - DNA, 15 bp, Homo sapiens
agcattgagcgtcac

SEQ ID NO: 1912479 - DNA, 15 bp, Homo sapiens
gcattgagcgtcacc

SEQ ID NO: 1912480 - DNA, 15 bp, Homo sapiens
cattgagcgtcacca

SEQ ID NO: 1912481 - DNA, 15 bp, Homo sapiens
attgagcgtcaccac

SEQ ID NO: 1912482 - DNA, 15 bp, Homo sapiens
ttgagcgtcaccact

SEQ ID NO: 1912483 - DNA, 15 bp, Homo sapiens
tgagcgtcaccactg

SEQ ID NO: 1912484 - DNA, 15 bp, Homo sapiens
gagcgtcaccactgg

SEQ ID NO: 1912485 - DNA, 15 bp, Homo sapiens
agcgtcaccactggg

SEQ ID NO: 1912486 - DNA, 15 bp, Homo sapiens
gcgtcaccactgggc

SEQ ID NO: 1912487 - DNA, 15 bp, Homo sapiens
cgtcaccactgggcc

SEQ ID NO: 1912488 - DNA, 15 bp, Homo sapiens
gtcaccactgggcca

SEQ ID NO: 1912489 - DNA, 15 bp, Homo sapiens
tcaccactgggccac

SEQ ID NO: 1912490 - DNA, 15 bp, Homo sapiens
caccactgggccaca

SEQ ID NO: 1912491 - DNA, 15 bp, Homo sapiens
ccactgggccacagc

SEQ ID NO: 1912492 - DNA, 15 bp, Homo sapiens
cactgggccacagcc

SEQ ID NO: 1912493 - DNA, 15 bp, Homo sapiens
actgggccacagcca

SEQ ID NO: 1912494 - DNA, 15 bp, Homo sapiens
ctgggccacagccac

SEQ ID NO: 1912495 - DNA, 15 bp, Homo sapiens
tgggccacagccaca

SEQ ID NO: 1912496 - DNA, 15 bp, Homo sapiens
gggccacagccacag

SEQ ID NO: 1912497 - DNA, 15 bp, Homo sapiens
ggccacagccacagt

SEQ ID NO: 1912498 - DNA, 15 bp, Homo sapiens
gccacagccacagtc

SEQ ID NO: 1912499 - DNA, 15 bp, Homo sapiens
ccacagccacagtct

SEQ ID NO: 1912500 - DNA, 15 bp, Homo sapiens
cacagccacagtctc

SEQ ID NO: 1912501 - DNA, 15 bp, Homo sapiens
acagccacagtctct

SEQ ID NO: 1912502 - DNA, 15 bp, Homo sapiens
cagccacagtctctc

SEQ ID NO: 1912503 - DNA, 15 bp, Homo sapiens
agccacagtctctct

SEQ ID NO: 1912504 - DNA, 15 bp, Homo sapiens
gccacagtctctctg

SEQ ID NO: 1912505 - DNA, 15 bp, Homo sapiens
ccacagtctctctgc

SEQ ID NO: 1912506 - DNA, 15 bp, Homo sapiens
cacagtctctctgcg

SEQ ID NO: 1912507 - DNA, 15 bp, Homo sapiens
acagtctctctgcgc

SEQ ID NO: 1912508 - DNA, 15 bp, Homo sapiens
cagtctctctgcgcc

SEQ ID NO: 1912509 - DNA, 15 bp, Homo sapiens
agtctctctgcgccc

SEQ ID NO: 1912510 - DNA, 15 bp, Homo sapiens
gtctctctgcgccca

SEQ ID NO: 1912511 - DNA, 15 bp, Homo sapiens
tctctctgcgcccac

SEQ ID NO: 1912512 - DNA, 15 bp, Homo sapiens
ctctctgcgcccaca

SEQ ID NO: 1912513 - DNA, 15 bp, Homo sapiens
tctctgcgcccacag

SEQ ID NO: 1912514 - DNA, 15 bp, Homo sapiens
ctctgcgcccacagc

SEQ ID NO: 1912515 - DNA, 15 bp, Homo sapiens
tctgcgcccacagct

SEQ ID NO: 1912516 - DNA, 15 bp, Homo sapiens
ctgcgcccacagctg

SEQ ID NO: 1912517 - DNA, 15 bp, Homo sapiens
tgcgcccacagctgg

SEQ ID NO: 1912518 - DNA, 15 bp, Homo sapiens
gcgcccacagctggc

SEQ ID NO: 1912519 - DNA, 15 bp, Homo sapiens
cgcccacagctggcc

SEQ ID NO: 1912520 - DNA, 15 bp, Homo sapiens
gcccacagctggccc

SEQ ID NO: 1912521 - DNA, 15 bp, Homo sapiens
cccacagctggcccc

SEQ ID NO: 1912522 - DNA, 15 bp, Homo sapiens
ccacagctggcccct

SEQ ID NO: 1912523 - DNA, 15 bp, Homo sapiens
cacagctggcccctg

SEQ ID NO: 1912524 - DNA, 15 bp, Homo sapiens
acagctggcccctga

SEQ ID NO: 1912525 - DNA, 15 bp, Homo sapiens
cagctggcccctgac

SEQ ID NO: 1912526 - DNA, 15 bp, Homo sapiens
agctggcccctgacc

SEQ ID NO: 1912527 - DNA, 15 bp, Homo sapiens
gctggcccctgaccc

SEQ ID NO: 1912528 - DNA, 15 bp, Homo sapiens
ctggcccctgaccct

SEQ ID NO: 1912529 - DNA, 15 bp, Homo sapiens
tggcccctgaccctg

SEQ ID NO: 1912530 - DNA, 15 bp, Homo sapiens
ggcccctgaccctgc

SEQ ID NO: 1912531 - DNA, 15 bp, Homo sapiens
gcccctgaccctgca

SEQ ID NO: 1912532 - DNA, 15 bp, Homo sapiens
cccctgaccctgcag

SEQ ID NO: 1912533 - DNA, 15 bp, Homo sapiens
ccctgaccctgcagc

SEQ ID NO: 1912534 - DNA, 15 bp, Homo sapiens
cctgaccctgcagcc

SEQ ID NO: 1912535 - DNA, 15 bp, Homo sapiens
ctgaccctgcagccc

SEQ ID NO: 1912536 - DNA, 15 bp, Homo sapiens
tgaccctgcagcccc

SEQ ID NO: 1912537 - DNA, 15 bp, Homo sapiens
gaccctgcagccccc

SEQ ID NO: 1912538 - DNA, 15 bp, Homo sapiens
accctgcagcccccg

SEQ ID NO: 1912539 - DNA, 15 bp, Homo sapiens
ccctgcagcccccgt

SEQ ID NO: 1912540 - DNA, 15 bp, Homo sapiens
cctgcagcccccgtt

SEQ ID NO: 1912541 - DNA, 15 bp, Homo sapiens
ctgcagcccccgttc

SEQ ID NO: 1912542 - DNA, 15 bp, Homo sapiens
tgcagcccccgttcc

SEQ ID NO: 1912543 - DNA, 15 bp, Homo sapiens
gcagcccccgttcct

SEQ ID NO: 1912544 - DNA, 15 bp, Homo sapiens
cagcccccgttcctt

SEQ ID NO: 1912545 - DNA, 15 bp, Homo sapiens
agcccccgttcctta

SEQ ID NO: 1912546 - DNA, 15 bp, Homo sapiens
gcccccgttccttac

SEQ ID NO: 1912547 - DNA, 15 bp, Homo sapiens
cccccgttccttacc

SEQ ID NO: 1912548 - DNA, 15 bp, Homo sapiens
ccccgttccttaccc

SEQ ID NO: 1912549 - DNA, 15 bp, Homo sapiens
cccgttccttaccca

SEQ ID NO: 1912550 - DNA, 15 bp, Homo sapiens
ccgttccttacccat

SEQ ID NO: 1912551 - DNA, 15 bp, Homo sapiens
cgttccttacccatc

SEQ ID NO: 1912552 - DNA, 15 bp, Homo sapiens
gttccttacccatca

SEQ ID NO: 1912553 - DNA, 15 bp, Homo sapiens
ttccttacccatcat

SEQ ID NO: 1912554 - DNA, 15 bp, Homo sapiens
tccttacccatcatt

SEQ ID NO: 1912555 - DNA, 15 bp, Homo sapiens
ccttacccatcattc

SEQ ID NO: 1912556 - DNA, 15 bp, Homo sapiens
cttacccatcattcc

SEQ ID NO: 1912557 - DNA, 15 bp, Homo sapiens
ttacccatcattcca

SEQ ID NO: 1912558 - DNA, 15 bp, Homo sapiens
tacccatcattccag

SEQ ID NO: 1912559 - DNA, 15 bp, Homo sapiens
acccatcattccagt

SEQ ID NO: 1912560 - DNA, 15 bp, Homo sapiens
cccatcattccagtg

SEQ ID NO: 1912561 - DNA, 15 bp, Homo sapiens
ccatcattccagtgg

SEQ ID NO: 1912562 - DNA, 15 bp, Homo sapiens
catcattccagtggg

SEQ ID NO: 1912563 - DNA, 15 bp, Homo sapiens
atcattccagtgggg

SEQ ID NO: 1912564 - DNA, 15 bp, Homo sapiens
tcattccagtggggc

SEQ ID NO: 1912565 - DNA, 15 bp, Homo sapiens
cattccagtggggct

SEQ ID NO: 1912566 - DNA, 15 bp, Homo sapiens
attccagtggggctt

SEQ ID NO: 1912567 - DNA, 15 bp, Homo sapiens
ttccagtggggcttg

SEQ ID NO: 1912568 - DNA, 15 bp, Homo sapiens
tccagtggggcttgt

SEQ ID NO: 1912569 - DNA, 15 bp, Homo sapiens
ccagtggggcttgtg

SEQ ID NO: 1912570 - DNA, 15 bp, Homo sapiens
cagtggggcttgtgg

SEQ ID NO: 1912571 - DNA, 15 bp, Homo sapiens
agtggggcttgtggt

SEQ ID NO: 1912572 - DNA, 15 bp, Homo sapiens
gtggggcttgtggtg

SEQ ID NO: 1912573 - DNA, 15 bp, Homo sapiens
tggggcttgtggtgc

SEQ ID NO: 1912574 - DNA, 15 bp, Homo sapiens
ggggcttgtggtgct

SEQ ID NO: 1912575 - DNA, 15 bp, Homo sapiens
gggcttgtggtgctt

SEQ ID NO: 1912576 - DNA, 15 bp, Homo sapiens
ggcttgtggtgcttc

SEQ ID NO: 1912577 - DNA, 15 bp, Homo sapiens
gcttgtggtgcttct

SEQ ID NO: 1912578 - DNA, 15 bp, Homo sapiens
cttgtggtgcttctt

SEQ ID NO: 1912579 - DNA, 15 bp, Homo sapiens
ttgtggtgcttcttc

SEQ ID NO: 1912580 - DNA, 15 bp, Homo sapiens
tgtggtgcttcttca

SEQ ID NO: 1912581 - DNA, 15 bp, Homo sapiens
gtggtgcttcttcaa

SEQ ID NO: 1912582 - DNA, 15 bp, Homo sapiens
tggtgcttcttcaac

SEQ ID NO: 1912583 - DNA, 15 bp, Homo sapiens
ggtgcttcttcaaca

SEQ ID NO: 1912584 - DNA, 15 bp, Homo sapiens
gtgcttcttcaacac

SEQ ID NO: 1912585 - DNA, 15 bp, Homo sapiens
tgcttcttcaacacc

SEQ ID NO: 1912586 - DNA, 15 bp, Homo sapiens
gcttcttcaacacct

SEQ ID NO: 1912587 - DNA, 15 bp, Homo sapiens
cttcttcaacacctc

SEQ ID NO: 1912588 - DNA, 15 bp, Homo sapiens
ttcttcaacacctcc

SEQ ID NO: 1912589 - DNA, 15 bp, Homo sapiens
tcttcaacacctcca

SEQ ID NO: 1912590 - DNA, 15 bp, Homo sapiens
cttcaacacctccat

SEQ ID NO: 1912591 - DNA, 15 bp, Homo sapiens
ttcaacacctccatc

SEQ ID NO: 1912592 - DNA, 15 bp, Homo sapiens
tcaacacctccatca

SEQ ID NO: 1912593 - DNA, 15 bp, Homo sapiens
caacacctccatcac

SEQ ID NO: 1912594 - DNA, 15 bp, Homo sapiens
aacacctccatcacc

SEQ ID NO: 1912595 - DNA, 15 bp, Homo sapiens
acacctccatcaccc

SEQ ID NO: 1912596 - DNA, 15 bp, Homo sapiens
cacctccatcacccc

SEQ ID NO: 1912597 - DNA, 15 bp, Homo sapiens
acctccatcaccccg

SEQ ID NO: 1912598 - DNA, 15 bp, Homo sapiens
cctccatcaccccgt

SEQ ID NO: 1912599 - DNA, 15 bp, Homo sapiens
ctccatcaccccgtc

SEQ ID NO: 1912600 - DNA, 15 bp, Homo sapiens
tccatcaccccgtca

SEQ ID NO: 1912601 - DNA, 15 bp, Homo sapiens
ccatcaccccgtcaa

SEQ ID NO: 1912602 - DNA, 15 bp, Homo sapiens
catcaccccgtcaaa

SEQ ID NO: 1912603 - DNA, 15 bp, Homo sapiens
atcaccccgtcaaac

SEQ ID NO: 1912604 - DNA, 15 bp, Homo sapiens
tcaccccgtcaaacc

SEQ ID NO: 1912605 - DNA, 15 bp, Homo sapiens
caccccgtcaaacca

SEQ ID NO: 1912606 - DNA, 15 bp, Homo sapiens
accccgtcaaaccac

SEQ ID NO: 1912607 - DNA, 15 bp, Homo sapiens
ccccgtcaaaccact

SEQ ID NO: 1912608 - DNA, 15 bp, Homo sapiens
cccgtcaaaccactg

SEQ ID NO: 1912609 - DNA, 15 bp, Homo sapiens
ccgtcaaaccactgc

SEQ ID NO: 1912610 - DNA, 15 bp, Homo sapiens
cgtcaaaccactgcc

SEQ ID NO: 1912611 - DNA, 15 bp, Homo sapiens
gtcaaaccactgcca

SEQ ID NO: 1912612 - DNA, 15 bp, Homo sapiens
tcaaaccactgccag

SEQ ID NO: 1912613 - DNA, 15 bp, Homo sapiens
caaaccactgccaga

SEQ ID NO: 1912614 - DNA, 15 bp, Homo sapiens
aaaccactgccagaa

SEQ ID NO: 1912615 - DNA, 15 bp, Homo sapiens
aaccactgccagaag

SEQ ID NO: 1912616 - DNA, 15 bp, Homo sapiens
accactgccagaagg

SEQ ID NO: 1912617 - DNA, 15 bp, Homo sapiens
ccactgccagaaggt

SEQ ID NO: 1912618 - DNA, 15 bp, Homo sapiens
cactgccagaaggtg

SEQ ID NO: 1912619 - DNA, 15 bp, Homo sapiens
actgccagaaggtgt

SEQ ID NO: 1912620 - DNA, 15 bp, Homo sapiens
ctgccagaaggtgta

SEQ ID NO: 1912621 - DNA, 15 bp, Homo sapiens
tgccagaaggtgtag

SEQ ID NO: 1912622 - DNA, 15 bp, Homo sapiens
gccagaaggtgtagt

SEQ ID NO: 1912623 - DNA, 15 bp, Homo sapiens
ccagaaggtgtagtt

SEQ ID NO: 1912624 - DNA, 15 bp, Homo sapiens
cagaaggtgtagttc

SEQ ID NO: 1912625 - DNA, 15 bp, Homo sapiens
agaaggtgtagttcc

SEQ ID NO: 1912626 - DNA, 15 bp, Homo sapiens
gaaggtgtagttcca

SEQ ID NO: 1912627 - DNA, 15 bp, Homo sapiens
aaggtgtagttccag

SEQ ID NO: 1912628 - DNA, 15 bp, Homo sapiens
aggtgtagttccagc

SEQ ID NO: 1912629 - DNA, 15 bp, Homo sapiens
ggtgtagttccagcc

SEQ ID NO: 1912630 - DNA, 15 bp, Homo sapiens
gtgtagttccagccc

SEQ ID NO: 1912631 - DNA, 15 bp, Homo sapiens
tgtagttccagcccg

SEQ ID NO: 1912632 - DNA, 15 bp, Homo sapiens
gtagttccagcccgg

SEQ ID NO: 1912633 - DNA, 15 bp, Homo sapiens
tagttccagcccggc

SEQ ID NO: 1912634 - DNA, 15 bp, Homo sapiens
agttccagcccggca

SEQ ID NO: 1912635 - DNA, 15 bp, Homo sapiens
gttccagcccggcaa

SEQ ID NO: 1912636 - DNA, 15 bp, Homo sapiens
ttccagcccggcaag

SEQ ID NO: 1912637 - DNA, 15 bp, Homo sapiens
tccagcccggcaagt

SEQ ID NO: 1912638 - DNA, 15 bp, Homo sapiens
ccagcccggcaagtt

SEQ ID NO: 1912639 - DNA, 15 bp, Homo sapiens
cagcccggcaagttc

SEQ ID NO: 1912640 - DNA, 15 bp, Homo sapiens
agcccggcaagttct

SEQ ID NO: 1912641 - DNA, 15 bp, Homo sapiens
gcccggcaagttctc

SEQ ID NO: 1912642 - DNA, 15 bp, Homo sapiens
cccggcaagttctcc

SEQ ID NO: 1912643 - DNA, 15 bp, Homo sapiens
ccggcaagttctcct

SEQ ID NO: 1912644 - DNA, 15 bp, Homo sapiens
cggcaagttctcctg

SEQ ID NO: 1912645 - DNA, 15 bp, Homo sapiens
ggcaagttctcctga

SEQ ID NO: 1912646 - DNA, 15 bp, Homo sapiens
gcaagttctcctgag

SEQ ID NO: 1912647 - DNA, 15 bp, Homo sapiens
caagttctcctgagg

SEQ ID NO: 1912648 - DNA, 15 bp, Homo sapiens
aagttctcctgaggg

SEQ ID NO: 1912649 - DNA, 15 bp, Homo sapiens
agttctcctgagggc

SEQ ID NO: 1912650 - DNA, 15 bp, Homo sapiens
gttctcctgagggcc

SEQ ID NO: 1912651 - DNA, 15 bp, Homo sapiens
ttctcctgagggccc

SEQ ID NO: 1912652 - DNA, 15 bp, Homo sapiens
tctcctgagggccca

SEQ ID NO: 1912653 - DNA, 15 bp, Homo sapiens
ctcctgagggcccag

SEQ ID NO: 1912654 - DNA, 15 bp, Homo sapiens
tcctgagggcccagg

SEQ ID NO: 1912655 - DNA, 15 bp, Homo sapiens
tgagggcccaggaac

SEQ ID NO: 1912656 - DNA, 15 bp, Homo sapiens
gagggcccaggaacc

SEQ ID NO: 1912657 - DNA, 15 bp, Homo sapiens
agggcccaggaaccc

SEQ ID NO: 1912658 - DNA, 15 bp, Homo sapiens
gggcccaggaacccc

SEQ ID NO: 1912659 - DNA, 15 bp, Homo sapiens
ggcccaggaaccccc

SEQ ID NO: 1912660 - DNA, 15 bp, Homo sapiens
gcccaggaacccccg

SEQ ID NO: 1912661 - DNA, 15 bp, Homo sapiens
cccaggaacccccga

SEQ ID NO: 1912662 - DNA, 15 bp, Homo sapiens
ccaggaacccccgag

SEQ ID NO: 1912663 - DNA, 15 bp, Homo sapiens
caggaacccccgagt

SEQ ID NO: 1912664 - DNA, 15 bp, Homo sapiens
aggaacccccgagtc

SEQ ID NO: 1912665 - DNA, 15 bp, Homo sapiens
ggaacccccgagtca

SEQ ID NO: 1912666 - DNA, 15 bp, Homo sapiens
gaacccccgagtcag

SEQ ID NO: 1912667 - DNA, 15 bp, Homo sapiens
aacccccgagtcagg

SEQ ID NO: 1912668 - DNA, 15 bp, Homo sapiens
acccccgagtcaggg

SEQ ID NO: 1912669 - DNA, 15 bp, Homo sapiens
cccccgagtcagggc

SEQ ID NO: 1912670 - DNA, 15 bp, Homo sapiens
ccccgagtcagggct

SEQ ID NO: 1912671 - DNA, 15 bp, Homo sapiens
cccgagtcagggctg

SEQ ID NO: 1912672 - DNA, 15 bp, Homo sapiens
ccgagtcagggctgg

SEQ ID NO: 1912673 - DNA, 15 bp, Homo sapiens
cgagtcagggctggt

SEQ ID NO: 1912674 - DNA, 15 bp, Homo sapiens
gagtcagggctggtg

SEQ ID NO: 1912675 - DNA, 15 bp, Homo sapiens
agtcagggctggtgc

SEQ ID NO: 1912676 - DNA, 15 bp, Homo sapiens
gtcagggctggtgcc

SEQ ID NO: 1912677 - DNA, 15 bp, Homo sapiens
tcagggctggtgccc

SEQ ID NO: 1912678 - DNA, 15 bp, Homo sapiens
cagggctggtgcccc

SEQ ID NO: 1912679 - DNA, 15 bp, Homo sapiens
agggctggtgcccca

SEQ ID NO: 1912680 - DNA, 15 bp, Homo sapiens
gggctggtgccccag

SEQ ID NO: 1912681 - DNA, 15 bp, Homo sapiens
ggctggtgccccagg

SEQ ID NO: 1912682 - DNA, 15 bp, Homo sapiens
gctggtgccccaggt

SEQ ID NO: 1912683 - DNA, 15 bp, Homo sapiens
ctggtgccccaggtc

SEQ ID NO: 1912684 - DNA, 15 bp, Homo sapiens
tggtgccccaggtca

SEQ ID NO: 1912685 - DNA, 15 bp, Homo sapiens
ggtgccccaggtcac

SEQ ID NO: 1912686 - DNA, 15 bp, Homo sapiens
gtgccccaggtcaca

SEQ ID NO: 1912687 - DNA, 15 bp, Homo sapiens
tgccccaggtcacag

SEQ ID NO: 1912688 - DNA, 15 bp, Homo sapiens
gccccaggtcacagg

SEQ ID NO: 1912689 - DNA, 15 bp, Homo sapiens
ccccaggtcacaggt

SEQ ID NO: 1912690 - DNA, 15 bp, Homo sapiens
cccaggtcacaggtg

SEQ ID NO: 1912691 - DNA, 15 bp, Homo sapiens
ccaggtcacaggtgg

SEQ ID NO: 1912692 - DNA, 15 bp, Homo sapiens
caggtcacaggtggc

SEQ ID NO: 1912693 - DNA, 15 bp, Homo sapiens
aggtcacaggtggcc

SEQ ID NO: 1912694 - DNA, 15 bp, Homo sapiens
ggtcacaggtggccc

SEQ ID NO: 1912695 - DNA, 15 bp, Homo sapiens
gtcacaggtggccca

SEQ ID NO: 1912696 - DNA, 15 bp, Homo sapiens
tcacaggtggcccag

SEQ ID NO: 1912697 - DNA, 15 bp, Homo sapiens
cacaggtggcccagg

SEQ ID NO: 1912698 - DNA, 15 bp, Homo sapiens
acaggtggcccagga

SEQ ID NO: 1912699 - DNA, 15 bp, Homo sapiens
caggtggcccaggaa

SEQ ID NO: 1912700 - DNA, 15 bp, Homo sapiens
aggtggcccaggaaa

SEQ ID NO: 1912701 - DNA, 15 bp, Homo sapiens
ggtggcccaggaaag

SEQ ID NO: 1912702 - DNA, 15 bp, Homo sapiens
gtggcccaggaaagt

SEQ ID NO: 1912703 - DNA, 15 bp, Homo sapiens
tggcccaggaaagtc

SEQ ID NO: 1912704 - DNA, 15 bp, Homo sapiens
ggcccaggaaagtca

SEQ ID NO: 1912705 - DNA, 15 bp, Homo sapiens
gcccaggaaagtcag

SEQ ID NO: 1912706 - DNA, 15 bp, Homo sapiens
cccaggaaagtcagg

SEQ ID NO: 1912707 - DNA, 15 bp, Homo sapiens
ccaggaaagtcaggg

SEQ ID NO: 1912708 - DNA, 15 bp, Homo sapiens
caggaaagtcagggc

SEQ ID NO: 1912709 - DNA, 15 bp, Homo sapiens
aggaaagtcagggcc

SEQ ID NO: 1912710 - DNA, 15 bp, Homo sapiens
ggaaagtcagggccc

SEQ ID NO: 1912711 - DNA, 15 bp, Homo sapiens
gaaagtcagggccct

SEQ ID NO: 1912712 - DNA, 15 bp, Homo sapiens
aaagtcagggccctc

SEQ ID NO: 1912713 - DNA, 15 bp, Homo sapiens
aagtcagggccctcc

SEQ ID NO: 1912714 - DNA, 15 bp, Homo sapiens
agtcagggccctcct

SEQ ID NO: 1912715 - DNA, 15 bp, Homo sapiens
gtcagggccctcctg

SEQ ID NO: 1912716 - DNA, 15 bp, Homo sapiens
tcagggccctcctgc

SEQ ID NO: 1912717 - DNA, 15 bp, Homo sapiens
cagggccctcctgcc

SEQ ID NO: 1912718 - DNA, 15 bp, Homo sapiens
agggccctcctgccc

SEQ ID NO: 1912719 - DNA, 15 bp, Homo sapiens
gggccctcctgcccc

SEQ ID NO: 1912720 - DNA, 15 bp, Homo sapiens
ggccctcctgccccc

SEQ ID NO: 1912721 - DNA, 15 bp, Homo sapiens
cctcctgcccccacc

SEQ ID NO: 1912722 - DNA, 15 bp, Homo sapiens
ctcctgcccccaccc

SEQ ID NO: 1912723 - DNA, 15 bp, Homo sapiens
tcctgcccccaccca

SEQ ID NO: 1912724 - DNA, 15 bp, Homo sapiens
cctgcccccacccag

SEQ ID NO: 1912725 - DNA, 15 bp, Homo sapiens
ctgcccccacccagt

SEQ ID NO: 1912726 - DNA, 15 bp, Homo sapiens
tgcccccacccagtc

SEQ ID NO: 1912727 - DNA, 15 bp, Homo sapiens
gcccccacccagtct

SEQ ID NO: 1912728 - DNA, 15 bp, Homo sapiens
cccccacccagtctt

SEQ ID NO: 1912729 - DNA, 15 bp, Homo sapiens
ccccacccagtcttc

SEQ ID NO: 1912730 - DNA, 15 bp, Homo sapiens
cccacccagtcttct

SEQ ID NO: 1912731 - DNA, 15 bp, Homo sapiens
ccacccagtcttctc

SEQ ID NO: 1912732 - DNA, 15 bp, Homo sapiens
cacccagtcttctcc

SEQ ID NO: 1912733 - DNA, 15 bp, Homo sapiens
acccagtcttctccc

SEQ ID NO: 1912734 - DNA, 15 bp, Homo sapiens
cccagtcttctccca

SEQ ID NO: 1912735 - DNA, 15 bp, Homo sapiens
ccagtcttctcccag

SEQ ID NO: 1912736 - DNA, 15 bp, Homo sapiens
cagtcttctcccagt

SEQ ID NO: 1912737 - DNA, 15 bp, Homo sapiens
agtcttctcccagtt

SEQ ID NO: 1912738 - DNA, 15 bp, Homo sapiens
gtcttctcccagttc

SEQ ID NO: 1912739 - DNA, 15 bp, Homo sapiens
tcttctcccagttct

SEQ ID NO: 1912740 - DNA, 15 bp, Homo sapiens
cttctcccagttctt

SEQ ID NO: 1912741 - DNA, 15 bp, Homo sapiens
ttctcccagttcttc

SEQ ID NO: 1912742 - DNA, 15 bp, Homo sapiens
tctcccagttcttca

SEQ ID NO: 1912743 - DNA, 15 bp, Homo sapiens
ctcccagttcttcac

SEQ ID NO: 1912744 - DNA, 15 bp, Homo sapiens
tcccagttcttcacc

SEQ ID NO: 1912745 - DNA, 15 bp, Homo sapiens
cccagttcttcaccc

SEQ ID NO: 1912746 - DNA, 15 bp, Homo sapiens
ccagttcttcacccc

SEQ ID NO: 1912747 - DNA, 15 bp, Homo sapiens
cagttcttcacccct

SEQ ID NO: 1912748 - DNA, 15 bp, Homo sapiens
agttcttcacccctg

SEQ ID NO: 1912749 - DNA, 15 bp, Homo sapiens
gttcttcacccctgc

SEQ ID NO: 1912750 - DNA, 15 bp, Homo sapiens
ttcttcacccctgct

SEQ ID NO: 1912751 - DNA, 15 bp, Homo sapiens
tcttcacccctgctt

SEQ ID NO: 1912752 - DNA, 15 bp, Homo sapiens
cttcacccctgcttg

SEQ ID NO: 1912753 - DNA, 15 bp, Homo sapiens
ttcacccctgcttgc

SEQ ID NO: 1912754 - DNA, 15 bp, Homo sapiens
tcacccctgcttgcc

SEQ ID NO: 1912755 - DNA, 15 bp, Homo sapiens
cacccctgcttgcca

SEQ ID NO: 1912756 - DNA, 15 bp, Homo sapiens
acccctgcttgccac

SEQ ID NO: 1912757 - DNA, 15 bp, Homo sapiens
cccctgcttgccacc

SEQ ID NO: 1912758 - DNA, 15 bp, Homo sapiens
ccctgcttgccacca

SEQ ID NO: 1912759 - DNA, 15 bp, Homo sapiens
cctgcttgccaccac

SEQ ID NO: 1912760 - DNA, 15 bp, Homo sapiens
ctgcttgccaccaca

SEQ ID NO: 1912761 - DNA, 15 bp, Homo sapiens
gcttgccaccacact

SEQ ID NO: 1912762 - DNA, 15 bp, Homo sapiens
cttgccaccacactc

SEQ ID NO: 1912763 - DNA, 15 bp, Homo sapiens
ttgccaccacactcc

SEQ ID NO: 1912764 - DNA, 15 bp, Homo sapiens
tgccaccacactcca

SEQ ID NO: 1912765 - DNA, 15 bp, Homo sapiens
gccaccacactccag

SEQ ID NO: 1912766 - DNA, 15 bp, Homo sapiens
ccaccacactccagc

SEQ ID NO: 1912767 - DNA, 15 bp, Homo sapiens
caccacactccagca

SEQ ID NO: 1912768 - DNA, 15 bp, Homo sapiens
accacactccagcag

SEQ ID NO: 1912769 - DNA, 15 bp, Homo sapiens
ccacactccagcaga

SEQ ID NO: 1912770 - DNA, 15 bp, Homo sapiens
cacactccagcagac

SEQ ID NO: 1912771 - DNA, 15 bp, Homo sapiens
acactccagcagacc

SEQ ID NO: 1912772 - DNA, 15 bp, Homo sapiens
cactccagcagacca

SEQ ID NO: 1912773 - DNA, 15 bp, Homo sapiens
actccagcagaccat

SEQ ID NO: 1912774 - DNA, 15 bp, Homo sapiens
ctccagcagaccata

SEQ ID NO: 1912775 - DNA, 15 bp, Homo sapiens
tccagcagaccataa

SEQ ID NO: 1912776 - DNA, 15 bp, Homo sapiens
ccagcagaccataaa

SEQ ID NO: 1912777 - DNA, 15 bp, Homo sapiens
cagcagaccataaag

SEQ ID NO: 1912778 - DNA, 15 bp, Homo sapiens
agcagaccataaagt

SEQ ID NO: 1912779 - DNA, 15 bp, Homo sapiens
gcagaccataaagtg

SEQ ID NO: 1912780 - DNA, 15 bp, Homo sapiens
cagaccataaagtga

SEQ ID NO: 1912781 - DNA, 15 bp, Homo sapiens
agaccataaagtgac

SEQ ID NO: 1912782 - DNA, 15 bp, Homo sapiens
gaccataaagtgaca

SEQ ID NO: 1912783 - DNA, 15 bp, Homo sapiens
accataaagtgacac

SEQ ID NO: 1912784 - DNA, 15 bp, Homo sapiens
ccataaagtgacaca

SEQ ID NO: 1912785 - DNA, 15 bp, Homo sapiens
cataaagtgacacag

SEQ ID NO: 1912786 - DNA, 15 bp, Homo sapiens
ataaagtgacacagc

SEQ ID NO: 1912787 - DNA, 15 bp, Homo sapiens
taaagtgacacagcc

SEQ ID NO: 1912788 - DNA, 15 bp, Homo sapiens
aaagtgacacagccc

SEQ ID NO: 1912789 - DNA, 15 bp, Homo sapiens
aagtgacacagcccc

SEQ ID NO: 1912790 - DNA, 15 bp, Homo sapiens
agtgacacagccccc

SEQ ID NO: 1912791 - DNA, 15 bp, Homo sapiens
gtgacacagccccca

SEQ ID NO: 1912792 - DNA, 15 bp, Homo sapiens
tgacacagcccccaa

SEQ ID NO: 1912793 - DNA, 15 bp, Homo sapiens
gacacagcccccaac

SEQ ID NO: 1912794 - DNA, 15 bp, Homo sapiens
acacagcccccaact

SEQ ID NO: 1912795 - DNA, 15 bp, Homo sapiens
cacagcccccaactt

SEQ ID NO: 1912796 - DNA, 15 bp, Homo sapiens
acagcccccaacttg

SEQ ID NO: 1912797 - DNA, 15 bp, Homo sapiens
cagcccccaacttgt

SEQ ID NO: 1912798 - DNA, 15 bp, Homo sapiens
agcccccaacttgta

SEQ ID NO: 1912799 - DNA, 15 bp, Homo sapiens
gcccccaacttgtac

SEQ ID NO: 1912800 - DNA, 15 bp, Homo sapiens
cccccaacttgtacc

SEQ ID NO: 1912801 - DNA, 15 bp, Homo sapiens
ccccaacttgtaccc

SEQ ID NO: 1912802 - DNA, 15 bp, Homo sapiens
cccaacttgtaccct

SEQ ID NO: 1912803 - DNA, 15 bp, Homo sapiens
ccaacttgtacccta

SEQ ID NO: 1912804 - DNA, 15 bp, Homo sapiens
caacttgtaccctag

SEQ ID NO: 1912805 - DNA, 15 bp, Homo sapiens
aacttgtaccctagg

SEQ ID NO: 1912806 - DNA, 15 bp, Homo sapiens
acttgtaccctagga

SEQ ID NO: 1912807 - DNA, 15 bp, Homo sapiens
cttgtaccctaggaa

SEQ ID NO: 1912808 - DNA, 15 bp, Homo sapiens
ttgtaccctaggaaa

SEQ ID NO: 1912809 - DNA, 15 bp, Homo sapiens
tgtaccctaggaaaa

SEQ ID NO: 1912810 - DNA, 15 bp, Homo sapiens
gtaccctaggaaaac

SEQ ID NO: 1912811 - DNA, 15 bp, Homo sapiens
taccctaggaaaaca

SEQ ID NO: 1912812 - DNA, 15 bp, Homo sapiens
accctaggaaaacag

SEQ ID NO: 1912813 - DNA, 15 bp, Homo sapiens
ccctaggaaaacaga

SEQ ID NO: 1912814 - DNA, 15 bp, Homo sapiens
cctaggaaaacagag

SEQ ID NO: 1912815 - DNA, 15 bp, Homo sapiens
ctaggaaaacagaga

SEQ ID NO: 1912816 - DNA, 15 bp, Homo sapiens
taggaaaacagagag

SEQ ID NO: 1912817 - DNA, 15 bp, Homo sapiens
aggaaaacagagagg

SEQ ID NO: 1912818 - DNA, 15 bp, Homo sapiens
ggaaaacagagagga

SEQ ID NO: 1912819 - DNA, 15 bp, Homo sapiens
aaacagagaggaaac

SEQ ID NO: 1912820 - DNA, 15 bp, Homo sapiens
aacagagaggaaact

SEQ ID NO: 1912821 - DNA, 15 bp, Homo sapiens
acagagaggaaactc

SEQ ID NO: 1912822 - DNA, 15 bp, Homo sapiens
cagagaggaaactca

SEQ ID NO: 1912823 - DNA, 15 bp, Homo sapiens
agagaggaaactcac

SEQ ID NO: 1912824 - DNA, 15 bp, Homo sapiens
gagaggaaactcact

SEQ ID NO: 1912825 - DNA, 15 bp, Homo sapiens
agaggaaactcactt

SEQ ID NO: 1912826 - DNA, 15 bp, Homo sapiens
gaggaaactcacttc

SEQ ID NO: 1912827 - DNA, 15 bp, Homo sapiens
aggaaactcacttct

SEQ ID NO: 1912828 - DNA, 15 bp, Homo sapiens
ggaaactcacttcta

SEQ ID NO: 1912829 - DNA, 15 bp, Homo sapiens
gaaactcacttctaa

SEQ ID NO: 1912830 - DNA, 15 bp, Homo sapiens
aaactcacttctaag

SEQ ID NO: 1912831 - DNA, 15 bp, Homo sapiens
aactcacttctaaga

SEQ ID NO: 1912832 - DNA, 15 bp, Homo sapiens
actcacttctaagac

SEQ ID NO: 1912833 - DNA, 15 bp, Homo sapiens
ctcacttctaagaca

SEQ ID NO: 1912834 - DNA, 15 bp, Homo sapiens
tcacttctaagacac

SEQ ID NO: 1912835 - DNA, 15 bp, Homo sapiens
cacttctaagacaca

SEQ ID NO: 1912836 - DNA, 15 bp, Homo sapiens
acttctaagacacag

SEQ ID NO: 1912837 - DNA, 15 bp, Homo sapiens
cttctaagacacagg

SEQ ID NO: 1912838 - DNA, 15 bp, Homo sapiens
ttctaagacacaggg

SEQ ID NO: 1912839 - DNA, 15 bp, Homo sapiens
tctaagacacagggg

SEQ ID NO: 1912840 - DNA, 15 bp, Homo sapiens
ctaagacacaggggt

SEQ ID NO: 1912841 - DNA, 15 bp, Homo sapiens
taagacacaggggtc

SEQ ID NO: 1912842 - DNA, 15 bp, Homo sapiens
aagacacaggggtcc

SEQ ID NO: 1912843 - DNA, 15 bp, Homo sapiens
agacacaggggtcca

SEQ ID NO: 1912844 - DNA, 15 bp, Homo sapiens
gacacaggggtccaa

SEQ ID NO: 1912845 - DNA, 15 bp, Homo sapiens
acacaggggtccaag

SEQ ID NO: 1912846 - DNA, 15 bp, Homo sapiens
cacaggggtccaaga

SEQ ID NO: 1912847 - DNA, 15 bp, Homo sapiens
acaggggtccaagac

SEQ ID NO: 1912848 - DNA, 15 bp, Homo sapiens
caggggtccaagacc

SEQ ID NO: 1912849 - DNA, 15 bp, Homo sapiens
aggggtccaagacca

SEQ ID NO: 1912850 - DNA, 15 bp, Homo sapiens
ggggtccaagaccag

SEQ ID NO: 1912851 - DNA, 15 bp, Homo sapiens
gggtccaagaccagc

SEQ ID NO: 1912852 - DNA, 15 bp, Homo sapiens
ggtccaagaccagcc

SEQ ID NO: 1912853 - DNA, 15 bp, Homo sapiens
gtccaagaccagccc

SEQ ID NO: 1912854 - DNA, 15 bp, Homo sapiens
tccaagaccagccca

SEQ ID NO: 1912855 - DNA, 15 bp, Homo sapiens
ccaagaccagcccaa

SEQ ID NO: 1912856 - DNA, 15 bp, Homo sapiens
caagaccagcccaag

SEQ ID NO: 1912857 - DNA, 15 bp, Homo sapiens
aagaccagcccaagg

SEQ ID NO: 1912858 - DNA, 15 bp, Homo sapiens
agaccagcccaaggg

SEQ ID NO: 1912859 - DNA, 15 bp, Homo sapiens
gaccagcccaagggt

SEQ ID NO: 1912860 - DNA, 15 bp, Homo sapiens
accagcccaagggtg

SEQ ID NO: 1912861 - DNA, 15 bp, Homo sapiens
ccagcccaagggtgg

SEQ ID NO: 1912862 - DNA, 15 bp, Homo sapiens
cagcccaagggtggg

SEQ ID NO: 1912863 - DNA, 15 bp, Homo sapiens
agcccaagggtggga

SEQ ID NO: 1912864 - DNA, 15 bp, Homo sapiens
gcccaagggtgggag

SEQ ID NO: 1912865 - DNA, 15 bp, Homo sapiens
cccaagggtgggagt

SEQ ID NO: 1912866 - DNA, 15 bp, Homo sapiens
ccaagggtgggagta

SEQ ID NO: 1912867 - DNA, 15 bp, Homo sapiens
caagggtgggagtaa

SEQ ID NO: 1912868 - DNA, 15 bp, Homo sapiens
aagggtgggagtaag

SEQ ID NO: 1912869 - DNA, 15 bp, Homo sapiens
agggtgggagtaaga

SEQ ID NO: 1912870 - DNA, 15 bp, Homo sapiens
gggtgggagtaagag

SEQ ID NO: 1912871 - DNA, 15 bp, Homo sapiens
ggtgggagtaagagg

SEQ ID NO: 1912872 - DNA, 15 bp, Homo sapiens
gtgggagtaagaggt

SEQ ID NO: 1912873 - DNA, 15 bp, Homo sapiens
tgggagtaagaggtg

SEQ ID NO: 1912874 - DNA, 15 bp, Homo sapiens
gggagtaagaggtgt

SEQ ID NO: 1912875 - DNA, 15 bp, Homo sapiens
ggagtaagaggtgta

SEQ ID NO: 1912876 - DNA, 15 bp, Homo sapiens
gagtaagaggtgtaa

SEQ ID NO: 1912877 - DNA, 15 bp, Homo sapiens
agtaagaggtgtaaa

SEQ ID NO: 1912878 - DNA, 15 bp, Homo sapiens
gtaagaggtgtaaag

SEQ ID NO: 1912879 - DNA, 15 bp, Homo sapiens
taagaggtgtaaaga

SEQ ID NO: 1912880 - DNA, 15 bp, Homo sapiens
aagaggtgtaaagaa

SEQ ID NO: 1912881 - DNA, 15 bp, Homo sapiens
agaggtgtaaagaat

SEQ ID NO: 1912882 - DNA, 15 bp, Homo sapiens
gaggtgtaaagaata

SEQ ID NO: 1912883 - DNA, 15 bp, Homo sapiens
aggtgtaaagaataa

SEQ ID NO: 1912884 - DNA, 15 bp, Homo sapiens
ggtgtaaagaataat

SEQ ID NO: 1912885 - DNA, 15 bp, Homo sapiens
gtgtaaagaataatc

SEQ ID NO: 1912886 - DNA, 15 bp, Homo sapiens
tgtaaagaataatct

SEQ ID NO: 1912887 - DNA, 15 bp, Homo sapiens
gtaaagaataatcta

SEQ ID NO: 1912888 - DNA, 15 bp, Homo sapiens
taaagaataatctag

SEQ ID NO: 1912889 - DNA, 15 bp, Homo sapiens
aaagaataatctagg

SEQ ID NO: 1912890 - DNA, 15 bp, Homo sapiens
aagaataatctaggc

SEQ ID NO: 1912891 - DNA, 15 bp, Homo sapiens
agaataatctaggct

SEQ ID NO: 1912892 - DNA, 15 bp, Homo sapiens
gaataatctaggctg

SEQ ID NO: 1912893 - DNA, 15 bp, Homo sapiens
aataatctaggctgg

SEQ ID NO: 1912894 - DNA, 15 bp, Homo sapiens
ataatctaggctgga

SEQ ID NO: 1912895 - DNA, 15 bp, Homo sapiens
taatctaggctggat

SEQ ID NO: 1912896 - DNA, 15 bp, Homo sapiens
aatctaggctggatg

SEQ ID NO: 1912897 - DNA, 15 bp, Homo sapiens
atctaggctggatgg

SEQ ID NO: 1912898 - DNA, 15 bp, Homo sapiens
tctaggctggatggg

SEQ ID NO: 1912899 - DNA, 15 bp, Homo sapiens
ctaggctggatgggg

SEQ ID NO: 1912900 - DNA, 15 bp, Homo sapiens
taggctggatggggc

SEQ ID NO: 1912901 - DNA, 15 bp, Homo sapiens
aggctggatggggcc

SEQ ID NO: 1912902 - DNA, 15 bp, Homo sapiens
ggctggatggggcct

SEQ ID NO: 1912903 - DNA, 15 bp, Homo sapiens
gctggatggggcctc

SEQ ID NO: 1912904 - DNA, 15 bp, Homo sapiens
ctggatggggcctcc

SEQ ID NO: 1912905 - DNA, 15 bp, Homo sapiens
tggatggggcctcca

SEQ ID NO: 1912906 - DNA, 15 bp, Homo sapiens
ggatggggcctccaa

SEQ ID NO: 1912907 - DNA, 15 bp, Homo sapiens
gatggggcctccaaa

SEQ ID NO: 1912908 - DNA, 15 bp, Homo sapiens
atggggcctccaaag

SEQ ID NO: 1912909 - DNA, 15 bp, Homo sapiens
tggggcctccaaagt

SEQ ID NO: 1912910 - DNA, 15 bp, Homo sapiens
ggggcctccaaagtc

SEQ ID NO: 1912911 - DNA, 15 bp, Homo sapiens
gggcctccaaagtca

SEQ ID NO: 1912912 - DNA, 15 bp, Homo sapiens
ggcctccaaagtcat

SEQ ID NO: 1912913 - DNA, 15 bp, Homo sapiens
gcctccaaagtcatt

SEQ ID NO: 1912914 - DNA, 15 bp, Homo sapiens
cctccaaagtcattc

SEQ ID NO: 1912915 - DNA, 15 bp, Homo sapiens
ctccaaagtcattcc

SEQ ID NO: 1912916 - DNA, 15 bp, Homo sapiens
tccaaagtcattcct

SEQ ID NO: 1912917 - DNA, 15 bp, Homo sapiens
ccaaagtcattcctc

SEQ ID NO: 1912918 - DNA, 15 bp, Homo sapiens
caaagtcattcctcc

SEQ ID NO: 1912919 - DNA, 15 bp, Homo sapiens
aaagtcattcctcca

SEQ ID NO: 1912920 - DNA, 15 bp, Homo sapiens
aagtcattcctccaa

SEQ ID NO: 1912921 - DNA, 15 bp, Homo sapiens
agtcattcctccaaa

SEQ ID NO: 1912922 - DNA, 15 bp, Homo sapiens
gtcattcctccaaag

SEQ ID NO: 1912923 - DNA, 15 bp, Homo sapiens
tcattcctccaaagt

SEQ ID NO: 1912924 - DNA, 15 bp, Homo sapiens
cattcctccaaagtc

SEQ ID NO: 1912925 - DNA, 15 bp, Homo sapiens
attcctccaaagtca

SEQ ID NO: 1912926 - DNA, 15 bp, Homo sapiens
ttcctccaaagtcat

SEQ ID NO: 1912927 - DNA, 15 bp, Homo sapiens
tcctccaaagtcatc

SEQ ID NO: 1912928 - DNA, 15 bp, Homo sapiens
cctccaaagtcatcc

SEQ ID NO: 1912929 - DNA, 15 bp, Homo sapiens
ctccaaagtcatccc

SEQ ID NO: 1912930 - DNA, 15 bp, Homo sapiens
tccaaagtcatcccc

SEQ ID NO: 1912931 - DNA, 15 bp, Homo sapiens
ccaaagtcatcccct

SEQ ID NO: 1912932 - DNA, 15 bp, Homo sapiens
caaagtcatcccctc

SEQ ID NO: 1912933 - DNA, 15 bp, Homo sapiens
aaagtcatcccctca

SEQ ID NO: 1912934 - DNA, 15 bp, Homo sapiens
aagtcatcccctcat

SEQ ID NO: 1912935 - DNA, 15 bp, Homo sapiens
agtcatcccctcatt

SEQ ID NO: 1912936 - DNA, 15 bp, Homo sapiens
gtcatcccctcattt

SEQ ID NO: 1912937 - DNA, 15 bp, Homo sapiens
tcatcccctcatttt

SEQ ID NO: 1912938 - DNA, 15 bp, Homo sapiens
catcccctcatttta

SEQ ID NO: 1912939 - DNA, 15 bp, Homo sapiens
atcccctcattttac

SEQ ID NO: 1912940 - DNA, 15 bp, Homo sapiens
tcccctcattttaca

SEQ ID NO: 1912941 - DNA, 15 bp, Homo sapiens
cccctcattttacag

SEQ ID NO: 1912942 - DNA, 15 bp, Homo sapiens
ccctcattttacagg

SEQ ID NO: 1912943 - DNA, 15 bp, Homo sapiens
cctcattttacaggt

SEQ ID NO: 1912944 - DNA, 15 bp, Homo sapiens
ctcattttacaggtg

SEQ ID NO: 1912945 - DNA, 15 bp, Homo sapiens
tcattttacaggtgg

SEQ ID NO: 1912946 - DNA, 15 bp, Homo sapiens
cattttacaggtggg

SEQ ID NO: 1912947 - DNA, 15 bp, Homo sapiens
attttacaggtgggg

SEQ ID NO: 1912948 - DNA, 15 bp, Homo sapiens
ttttacaggtgggga

SEQ ID NO: 1912949 - DNA, 15 bp, Homo sapiens
tttacaggtggggaa

SEQ ID NO: 1912950 - DNA, 15 bp, Homo sapiens
ttacaggtggggaaa

SEQ ID NO: 1912951 - DNA, 15 bp, Homo sapiens
tacaggtggggaaac

SEQ ID NO: 1912952 - DNA, 15 bp, Homo sapiens
acaggtggggaaact

SEQ ID NO: 1912953 - DNA, 15 bp, Homo sapiens
gaaactgaggcacag

SEQ ID NO: 1912954 - DNA, 15 bp, Homo sapiens
ctgaggcacagagaa

SEQ ID NO: 1912955 - DNA, 15 bp, Homo sapiens
tgaggcacagagaat

SEQ ID NO: 1912956 - DNA, 15 bp, Homo sapiens
gaggcacagagaatg

SEQ ID NO: 1912957 - DNA, 15 bp, Homo sapiens
ggcacagagaatgga

SEQ ID NO: 1912958 - DNA, 15 bp, Homo sapiens
gcacagagaatggat

SEQ ID NO: 1912959 - DNA, 15 bp, Homo sapiens
cacagagaatggatg

SEQ ID NO: 1912960 - DNA, 15 bp, Homo sapiens
acagagaatggatgg

SEQ ID NO: 1912961 - DNA, 15 bp, Homo sapiens
cagagaatggatggg

SEQ ID NO: 1912962 - DNA, 15 bp, Homo sapiens
agagaatggatgggt

SEQ ID NO: 1912963 - DNA, 15 bp, Homo sapiens
gagaatggatgggtc

SEQ ID NO: 1912964 - DNA, 15 bp, Homo sapiens
agaatggatgggtct

SEQ ID NO: 1912965 - DNA, 15 bp, Homo sapiens
gaatggatgggtctt

SEQ ID NO: 1912966 - DNA, 15 bp, Homo sapiens
aatggatgggtcttc

SEQ ID NO: 1912967 - DNA, 15 bp, Homo sapiens
atggatgggtcttca

SEQ ID NO: 1912968 - DNA, 15 bp, Homo sapiens
tggatgggtcttcaa

SEQ ID NO: 1912969 - DNA, 15 bp, Homo sapiens
ggatgggtcttcaaa

SEQ ID NO: 1912970 - DNA, 15 bp, Homo sapiens
gatgggtcttcaaaa

SEQ ID NO: 1912971 - DNA, 15 bp, Homo sapiens
atgggtcttcaaaaa

SEQ ID NO: 1912972 - DNA, 15 bp, Homo sapiens
tgggtcttcaaaaat

SEQ ID NO: 1912973 - DNA, 15 bp, Homo sapiens
gggtcttcaaaaatt

SEQ ID NO: 1912974 - DNA, 15 bp, Homo sapiens
ggtcttcaaaaatta

SEQ ID NO: 1912975 - DNA, 15 bp, Homo sapiens
gtcttcaaaaattag

SEQ ID NO: 1912976 - DNA, 15 bp, Homo sapiens
tcttcaaaaattagc

SEQ ID NO: 1912977 - DNA, 15 bp, Homo sapiens
cttcaaaaattagca

SEQ ID NO: 1912978 - DNA, 15 bp, Homo sapiens
ttcaaaaattagcaa

SEQ ID NO: 1912979 - DNA, 15 bp, Homo sapiens
tcaaaaattagcaag

SEQ ID NO: 1912980 - DNA, 15 bp, Homo sapiens
caaaaattagcaagg

SEQ ID NO: 1912981 - DNA, 15 bp, Homo sapiens
aaaaattagcaagga

SEQ ID NO: 1912982 - DNA, 15 bp, Homo sapiens
aaaattagcaaggag

SEQ ID NO: 1912983 - DNA, 15 bp, Homo sapiens
aaattagcaaggaga

SEQ ID NO: 1912984 - DNA, 15 bp, Homo sapiens
aattagcaaggagag

SEQ ID NO: 1912985 - DNA, 15 bp, Homo sapiens
attagcaaggagaga

SEQ ID NO: 1912986 - DNA, 15 bp, Homo sapiens
ttagcaaggagagag

SEQ ID NO: 1912987 - DNA, 15 bp, Homo sapiens
tagcaaggagagagg

SEQ ID NO: 1912988 - DNA, 15 bp, Homo sapiens
agcaaggagagaggc

SEQ ID NO: 1912989 - DNA, 15 bp, Homo sapiens
gcaaggagagaggca

SEQ ID NO: 1912990 - DNA, 15 bp, Homo sapiens
caaggagagaggcag

SEQ ID NO: 1912991 - DNA, 15 bp, Homo sapiens
aaggagagaggcaga

SEQ ID NO: 1912992 - DNA, 15 bp, Homo sapiens
aggagagaggcagaa

SEQ ID NO: 1912993 - DNA, 15 bp, Homo sapiens
ggagagaggcagaag

SEQ ID NO: 1912994 - DNA, 15 bp, Homo sapiens
gagagaggcagaagg

SEQ ID NO: 1912995 - DNA, 15 bp, Homo sapiens
agagaggcagaagga

SEQ ID NO: 1912996 - DNA, 15 bp, Homo sapiens
gagaggcagaaggag

SEQ ID NO: 1912997 - DNA, 15 bp, Homo sapiens
cagaaggagagccag

SEQ ID NO: 1912998 - DNA, 15 bp, Homo sapiens
agaaggagagccaga

SEQ ID NO: 1912999 - DNA, 15 bp, Homo sapiens
gaaggagagccagag

SEQ ID NO: 1913000 - DNA, 15 bp, Homo sapiens
aaggagagccagagc

SEQ ID NO: 1913001 - DNA, 15 bp, Homo sapiens
aggagagccagagcc

SEQ ID NO: 1913002 - DNA, 15 bp, Homo sapiens
ggagagccagagcca

SEQ ID NO: 1913003 - DNA, 15 bp, Homo sapiens
gagagccagagccac

SEQ ID NO: 1913004 - DNA, 15 bp, Homo sapiens
agagccagagccaca

SEQ ID NO: 1913005 - DNA, 15 bp, Homo sapiens
gagccagagccacag

SEQ ID NO: 1913006 - DNA, 15 bp, Homo sapiens
agccagagccacagg

SEQ ID NO: 1913007 - DNA, 15 bp, Homo sapiens
gccagagccacaggc

SEQ ID NO: 1913008 - DNA, 15 bp, Homo sapiens
ccagagccacaggcg

SEQ ID NO: 1913009 - DNA, 15 bp, Homo sapiens
cagagccacaggcgt

SEQ ID NO: 1913010 - DNA, 15 bp, Homo sapiens
agagccacaggcgtg

SEQ ID NO: 1913011 - DNA, 15 bp, Homo sapiens
gagccacaggcgtgg

SEQ ID NO: 1913012 - DNA, 15 bp, Homo sapiens
agccacaggcgtggt

SEQ ID NO: 1913013 - DNA, 15 bp, Homo sapiens
gccacaggcgtggtg

SEQ ID NO: 1913014 - DNA, 15 bp, Homo sapiens
ccacaggcgtggtgg

SEQ ID NO: 1913015 - DNA, 15 bp, Homo sapiens
cacaggcgtggtggc

SEQ ID NO: 1913016 - DNA, 15 bp, Homo sapiens
acaggcgtggtggct

SEQ ID NO: 1913017 - DNA, 15 bp, Homo sapiens
aaattagcccagcat

SEQ ID NO: 1913018 - DNA, 15 bp, Homo sapiens
aattagcccagcatg

SEQ ID NO: 1913019 - DNA, 15 bp, Homo sapiens
attagcccagcatgg

SEQ ID NO: 1913020 - DNA, 15 bp, Homo sapiens
ttagcccagcatggt

SEQ ID NO: 1913021 - DNA, 15 bp, Homo sapiens
tagcccagcatggtg

SEQ ID NO: 1913022 - DNA, 15 bp, Homo sapiens
agcccagcatggtgg

SEQ ID NO: 1913023 - DNA, 15 bp, Homo sapiens
gcccagcatggtggc

SEQ ID NO: 1913024 - DNA, 15 bp, Homo sapiens
cccagcatggtggca

SEQ ID NO: 1913025 - DNA, 15 bp, Homo sapiens
ccagcatggtggcag

SEQ ID NO: 1913026 - DNA, 15 bp, Homo sapiens
cagcatggtggcagg

SEQ ID NO: 1913027 - DNA, 15 bp, Homo sapiens
agcatggtggcaggc

SEQ ID NO: 1913028 - DNA, 15 bp, Homo sapiens
gcatggtggcaggca

SEQ ID NO: 1913029 - DNA, 15 bp, Homo sapiens
ggtggcaggcaccta

SEQ ID NO: 1913030 - DNA, 15 bp, Homo sapiens
gtggcaggcacctat

SEQ ID NO: 1913031 - DNA, 15 bp, Homo sapiens
tggcaggcacctata

SEQ ID NO: 1913032 - DNA, 15 bp, Homo sapiens
ggcaggcacctataa

SEQ ID NO: 1913033 - DNA, 15 bp, Homo sapiens
gcaggcacctataat

SEQ ID NO: 1913034 - DNA, 15 bp, Homo sapiens
caggcacctataatt

SEQ ID NO: 1913035 - DNA, 15 bp, Homo sapiens
aggcacctataattc

SEQ ID NO: 1913036 - DNA, 15 bp, Homo sapiens
ggcacctataattcc

SEQ ID NO: 1913037 - DNA, 15 bp, Homo sapiens
gcacctataattcca

SEQ ID NO: 1913038 - DNA, 15 bp, Homo sapiens
tgaggcacgagaatc

SEQ ID NO: 1913039 - DNA, 15 bp, Homo sapiens
gaggcacgagaatca

SEQ ID NO: 1913040 - DNA, 15 bp, Homo sapiens
aggcacgagaatcac

SEQ ID NO: 1913041 - DNA, 15 bp, Homo sapiens
ggcacgagaatcact

SEQ ID NO: 1913042 - DNA, 15 bp, Homo sapiens
gcacgagaatcactt

SEQ ID NO: 1913043 - DNA, 15 bp, Homo sapiens
cacgagaatcacttg

SEQ ID NO: 1913044 - DNA, 15 bp, Homo sapiens
acgagaatcacttga

SEQ ID NO: 1913045 - DNA, 15 bp, Homo sapiens
gggaggcagaggtta

SEQ ID NO: 1913046 - DNA, 15 bp, Homo sapiens
ggaggcagaggttac

SEQ ID NO: 1913047 - DNA, 15 bp, Homo sapiens
gaggcagaggttaca

SEQ ID NO: 1913048 - DNA, 15 bp, Homo sapiens
aggcagaggttacag

SEQ ID NO: 1913049 - DNA, 15 bp, Homo sapiens
ggcagaggttacagt

SEQ ID NO: 1913050 - DNA, 15 bp, Homo sapiens
gcagaggttacagta

SEQ ID NO: 1913051 - DNA, 15 bp, Homo sapiens
cagaggttacagtaa

SEQ ID NO: 1913052 - DNA, 15 bp, Homo sapiens
agaggttacagtaag

SEQ ID NO: 1913053 - DNA, 15 bp, Homo sapiens
gaggttacagtaagc

SEQ ID NO: 1913054 - DNA, 15 bp, Homo sapiens
aggttacagtaagct

SEQ ID NO: 1913055 - DNA, 15 bp, Homo sapiens
ggttacagtaagctg

SEQ ID NO: 1913056 - DNA, 15 bp, Homo sapiens
gttacagtaagctga

SEQ ID NO: 1913057 - DNA, 15 bp, Homo sapiens
ttacagtaagctgaa

SEQ ID NO: 1913058 - DNA, 15 bp, Homo sapiens
tacagtaagctgaaa

SEQ ID NO: 1913059 - DNA, 15 bp, Homo sapiens
acagtaagctgaaat

SEQ ID NO: 1913060 - DNA, 15 bp, Homo sapiens
cagtaagctgaaatc

SEQ ID NO: 1913061 - DNA, 15 bp, Homo sapiens
agtaagctgaaatca

SEQ ID NO: 1913062 - DNA, 15 bp, Homo sapiens
gtaagctgaaatcac

SEQ ID NO: 1913063 - DNA, 15 bp, Homo sapiens
taagctgaaatcacg

SEQ ID NO: 1913064 - DNA, 15 bp, Homo sapiens
aagctgaaatcacgc

SEQ ID NO: 1913065 - DNA, 15 bp, Homo sapiens
agctgaaatcacgcc

SEQ ID NO: 1913066 - DNA, 15 bp, Homo sapiens
gctgaaatcacgcca

SEQ ID NO: 1913067 - DNA, 15 bp, Homo sapiens
ctgaaatcacgccac

SEQ ID NO: 1913068 - DNA, 15 bp, Homo sapiens
tgaaatcacgccact

SEQ ID NO: 1913069 - DNA, 15 bp, Homo sapiens
gaaatcacgccactg

SEQ ID NO: 1913070 - DNA, 15 bp, Homo sapiens
aaatcacgccactgc

SEQ ID NO: 1913071 - DNA, 15 bp, Homo sapiens
aatcacgccactgca

SEQ ID NO: 1913072 - DNA, 15 bp, Homo sapiens
gtgacagaatgagat

SEQ ID NO: 1913073 - DNA, 15 bp, Homo sapiens
tgacagaatgagatt

SEQ ID NO: 1913074 - DNA, 15 bp, Homo sapiens
gacagaatgagattc

SEQ ID NO: 1913075 - DNA, 15 bp, Homo sapiens
acagaatgagattct

SEQ ID NO: 1913076 - DNA, 15 bp, Homo sapiens
cagaatgagattctg

SEQ ID NO: 1913077 - DNA, 15 bp, Homo sapiens
agaatgagattctgt

SEQ ID NO: 1913078 - DNA, 15 bp, Homo sapiens
gaatgagattctgtc

SEQ ID NO: 1913079 - DNA, 15 bp, Homo sapiens
aatgagattctgtct

SEQ ID NO: 1913080 - DNA, 15 bp, Homo sapiens
atgagattctgtctc

SEQ ID NO: 1913081 - DNA, 15 bp, Homo sapiens
tgagattctgtctct

SEQ ID NO: 1913082 - DNA, 15 bp, Homo sapiens
gagattctgtctcta

SEQ ID NO: 1913083 - DNA, 15 bp, Homo sapiens
agattctgtctctaa

SEQ ID NO: 1913084 - DNA, 15 bp, Homo sapiens
gattctgtctctaaa

SEQ ID NO: 1913085 - DNA, 15 bp, Homo sapiens
attctgtctctaaaa

SEQ ID NO: 1913086 - DNA, 15 bp, Homo sapiens
ttctgtctctaaaaa

SEQ ID NO: 1913087 - DNA, 15 bp, Homo sapiens
tctgtctctaaaaaa

SEQ ID NO: 1913088 - DNA, 15 bp, Homo sapiens
tgtctctaaaaaaaa

SEQ ID NO: 1913089 - DNA, 15 bp, Homo sapiens
gtctctaaaaaaaaa

SEQ ID NO: 1913090 - DNA, 15 bp, Homo sapiens
tctctaaaaaaaaaa

SEQ ID NO: 1913091 - DNA, 15 bp, Homo sapiens
ctctaaaaaaaaaaa

SEQ ID NO: 1913092 - DNA, 15 bp, Homo sapiens
aaaagaaaattagca

SEQ ID NO: 1913093 - DNA, 15 bp, Homo sapiens
aaagaaaattagcaa

SEQ ID NO: 1913094 - DNA, 15 bp, Homo sapiens
aagaaaattagcaaa

SEQ ID NO: 1913095 - DNA, 15 bp, Homo sapiens
agaaaattagcaaac

SEQ ID NO: 1913096 - DNA, 15 bp, Homo sapiens
gaaaattagcaaaca

SEQ ID NO: 1913097 - DNA, 15 bp, Homo sapiens
aaaattagcaaacac

SEQ ID NO: 1913098 - DNA, 15 bp, Homo sapiens
aaattagcaaacaca

SEQ ID NO: 1913099 - DNA, 15 bp, Homo sapiens
aattagcaaacacat

SEQ ID NO: 1913100 - DNA, 15 bp, Homo sapiens
attagcaaacacatc

SEQ ID NO: 1913101 - DNA, 15 bp, Homo sapiens
ttagcaaacacatct

SEQ ID NO: 1913102 - DNA, 15 bp, Homo sapiens
tagcaaacacatcta

SEQ ID NO: 1913103 - DNA, 15 bp, Homo sapiens
agcaaacacatctag

SEQ ID NO: 1913104 - DNA, 15 bp, Homo sapiens
gcaaacacatctagg

SEQ ID NO: 1913105 - DNA, 15 bp, Homo sapiens
caaacacatctaggc

SEQ ID NO: 1913106 - DNA, 15 bp, Homo sapiens
aaacacatctaggcc

SEQ ID NO: 1913107 - DNA, 15 bp, Homo sapiens
aacacatctaggccc

SEQ ID NO: 1913108 - DNA, 15 bp, Homo sapiens
acacatctaggccca

SEQ ID NO: 1913109 - DNA, 15 bp, Homo sapiens
cacatctaggcccag

SEQ ID NO: 1913110 - DNA, 15 bp, Homo sapiens
acatctaggcccaga

SEQ ID NO: 1913111 - DNA, 15 bp, Homo sapiens
catctaggcccagaa

SEQ ID NO: 1913112 - DNA, 15 bp, Homo sapiens
atctaggcccagaac

SEQ ID NO: 1913113 - DNA, 15 bp, Homo sapiens
tctaggcccagaacc

SEQ ID NO: 1913114 - DNA, 15 bp, Homo sapiens
ctaggcccagaaccc

SEQ ID NO: 1913115 - DNA, 15 bp, Homo sapiens
taggcccagaaccca

SEQ ID NO: 1913116 - DNA, 15 bp, Homo sapiens
aggcccagaacccaa

SEQ ID NO: 1913117 - DNA, 15 bp, Homo sapiens
ggcccagaacccaag

SEQ ID NO: 1913118 - DNA, 15 bp, Homo sapiens
gcccagaacccaagg

SEQ ID NO: 1913119 - DNA, 15 bp, Homo sapiens
cccagaacccaagga

SEQ ID NO: 1913120 - DNA, 15 bp, Homo sapiens
ccagaacccaaggat

SEQ ID NO: 1913121 - DNA, 15 bp, Homo sapiens
cagaacccaaggatc

SEQ ID NO: 1913122 - DNA, 15 bp, Homo sapiens
agaacccaaggatcc

SEQ ID NO: 1913123 - DNA, 15 bp, Homo sapiens
gaacccaaggatcct

SEQ ID NO: 1913124 - DNA, 15 bp, Homo sapiens
aacccaaggatcctg

SEQ ID NO: 1913125 - DNA, 15 bp, Homo sapiens
acccaaggatcctga

SEQ ID NO: 1913126 - DNA, 15 bp, Homo sapiens
cccaaggatcctgac

SEQ ID NO: 1913127 - DNA, 15 bp, Homo sapiens
ccaaggatcctgact

SEQ ID NO: 1913128 - DNA, 15 bp, Homo sapiens
caaggatcctgactc

SEQ ID NO: 1913129 - DNA, 15 bp, Homo sapiens
aaggatcctgactcc

SEQ ID NO: 1913130 - DNA, 15 bp, Homo sapiens
aggatcctgactccc

SEQ ID NO: 1913131 - DNA, 15 bp, Homo sapiens
ggatcctgactccca

SEQ ID NO: 1913132 - DNA, 15 bp, Homo sapiens
gatcctgactcccag

SEQ ID NO: 1913133 - DNA, 15 bp, Homo sapiens
atcctgactcccagc

SEQ ID NO: 1913134 - DNA, 15 bp, Homo sapiens
tcctgactcccagcc

SEQ ID NO: 1913135 - DNA, 15 bp, Homo sapiens
cctgactcccagccc

SEQ ID NO: 1913136 - DNA, 15 bp, Homo sapiens
ctgactcccagccct

SEQ ID NO: 1913137 - DNA, 15 bp, Homo sapiens
tgactcccagccctg

SEQ ID NO: 1913138 - DNA, 15 bp, Homo sapiens
gactcccagccctgg

SEQ ID NO: 1913139 - DNA, 15 bp, Homo sapiens
actcccagccctggg

SEQ ID NO: 1913140 - DNA, 15 bp, Homo sapiens
ctcccagccctgggc

SEQ ID NO: 1913141 - DNA, 15 bp, Homo sapiens
tcccagccctgggcc

SEQ ID NO: 1913142 - DNA, 15 bp, Homo sapiens
cccagccctgggccc

SEQ ID NO: 1913143 - DNA, 15 bp, Homo sapiens
ccagccctgggccct

SEQ ID NO: 1913144 - DNA, 15 bp, Homo sapiens
cagccctgggccctc

SEQ ID NO: 1913145 - DNA, 15 bp, Homo sapiens
agccctgggccctcc

SEQ ID NO: 1913146 - DNA, 15 bp, Homo sapiens
gccctgggccctccg

SEQ ID NO: 1913147 - DNA, 15 bp, Homo sapiens
ccctgggccctccgt

SEQ ID NO: 1913148 - DNA, 15 bp, Homo sapiens
cctgggccctccgtc

SEQ ID NO: 1913149 - DNA, 15 bp, Homo sapiens
ctgggccctccgtca

SEQ ID NO: 1913150 - DNA, 15 bp, Homo sapiens
tgggccctccgtcat

SEQ ID NO: 1913151 - DNA, 15 bp, Homo sapiens
gggccctccgtcatc

SEQ ID NO: 1913152 - DNA, 15 bp, Homo sapiens
ggccctccgtcatct

SEQ ID NO: 1913153 - DNA, 15 bp, Homo sapiens
gccctccgtcatctc

SEQ ID NO: 1913154 - DNA, 15 bp, Homo sapiens
ccctccgtcatctcg

SEQ ID NO: 1913155 - DNA, 15 bp, Homo sapiens
cctccgtcatctcgc

SEQ ID NO: 1913156 - DNA, 15 bp, Homo sapiens
ctccgtcatctcgct

SEQ ID NO: 1913157 - DNA, 15 bp, Homo sapiens
tccgtcatctcgctc

SEQ ID NO: 1913158 - DNA, 15 bp, Homo sapiens
ccgtcatctcgctct

SEQ ID NO: 1913159 - DNA, 15 bp, Homo sapiens
cgtcatctcgctctt

SEQ ID NO: 1913160 - DNA, 15 bp, Homo sapiens
gtcatctcgctcttg

SEQ ID NO: 1913161 - DNA, 15 bp, Homo sapiens
tcatctcgctcttgg

SEQ ID NO: 1913162 - DNA, 15 bp, Homo sapiens
catctcgctcttggc

SEQ ID NO: 1913163 - DNA, 15 bp, Homo sapiens
atctcgctcttggct

SEQ ID NO: 1913164 - DNA, 15 bp, Homo sapiens
tctcgctcttggctt

SEQ ID NO: 1913165 - DNA, 15 bp, Homo sapiens
ctcgctcttggcttc

SEQ ID NO: 1913166 - DNA, 15 bp, Homo sapiens
tcgctcttggcttca

SEQ ID NO: 1913167 - DNA, 15 bp, Homo sapiens
cgctcttggcttcac

SEQ ID NO: 1913168 - DNA, 15 bp, Homo sapiens
gctcttggcttcaca

SEQ ID NO: 1913169 - DNA, 15 bp, Homo sapiens
ctcttggcttcacaa

SEQ ID NO: 1913170 - DNA, 15 bp, Homo sapiens
tcttggcttcacaac

SEQ ID NO: 1913171 - DNA, 15 bp, Homo sapiens
cttggcttcacaact

SEQ ID NO: 1913172 - DNA, 15 bp, Homo sapiens
ttggcttcacaacta

SEQ ID NO: 1913173 - DNA, 15 bp, Homo sapiens
tggcttcacaactaa

SEQ ID NO: 1913174 - DNA, 15 bp, Homo sapiens
ggcttcacaactaag

SEQ ID NO: 1913175 - DNA, 15 bp, Homo sapiens
gcttcacaactaagc

SEQ ID NO: 1913176 - DNA, 15 bp, Homo sapiens
cttcacaactaagca

SEQ ID NO: 1913177 - DNA, 15 bp, Homo sapiens
ttcacaactaagcac

SEQ ID NO: 1913178 - DNA, 15 bp, Homo sapiens
tcacaactaagcaca

SEQ ID NO: 1913179 - DNA, 15 bp, Homo sapiens
cacaactaagcacaa

SEQ ID NO: 1913180 - DNA, 15 bp, Homo sapiens
acaactaagcacaac

SEQ ID NO: 1913181 - DNA, 15 bp, Homo sapiens
caactaagcacaact

SEQ ID NO: 1913182 - DNA, 15 bp, Homo sapiens
aactaagcacaactc

SEQ ID NO: 1913183 - DNA, 15 bp, Homo sapiens
actaagcacaactcc

SEQ ID NO: 1913184 - DNA, 15 bp, Homo sapiens
ctaagcacaactcct

SEQ ID NO: 1913185 - DNA, 15 bp, Homo sapiens
taagcacaactccta

SEQ ID NO: 1913186 - DNA, 15 bp, Homo sapiens
aagcacaactcctat

SEQ ID NO: 1913187 - DNA, 15 bp, Homo sapiens
agcacaactcctata

SEQ ID NO: 1913188 - DNA, 15 bp, Homo sapiens
gcacaactcctatag

SEQ ID NO: 1913189 - DNA, 15 bp, Homo sapiens
cacaactcctatagc

SEQ ID NO: 1913190 - DNA, 15 bp, Homo sapiens
acaactcctatagcc

SEQ ID NO: 1913191 - DNA, 15 bp, Homo sapiens
caactcctatagccc

SEQ ID NO: 1913192 - DNA, 15 bp, Homo sapiens
aactcctatagcccc

SEQ ID NO: 1913193 - DNA, 15 bp, Homo sapiens
actcctatagcccct

SEQ ID NO: 1913194 - DNA, 15 bp, Homo sapiens
ctcctatagcccctg

SEQ ID NO: 1913195 - DNA, 15 bp, Homo sapiens
tcctatagcccctgc

SEQ ID NO: 1913196 - DNA, 15 bp, Homo sapiens
cctatagcccctgcc

SEQ ID NO: 1913197 - DNA, 15 bp, Homo sapiens
ctatagcccctgcct

SEQ ID NO: 1913198 - DNA, 15 bp, Homo sapiens
tatagcccctgcctg

SEQ ID NO: 1913199 - DNA, 15 bp, Homo sapiens
atagcccctgcctgc

SEQ ID NO: 1913200 - DNA, 15 bp, Homo sapiens
tagcccctgcctgca

SEQ ID NO: 1913201 - DNA, 15 bp, Homo sapiens
agcccctgcctgcat

SEQ ID NO: 1913202 - DNA, 15 bp, Homo sapiens
gcccctgcctgcatt

SEQ ID NO: 1913203 - DNA, 15 bp, Homo sapiens
cccctgcctgcattt

SEQ ID NO: 1913204 - DNA, 15 bp, Homo sapiens
ccctgcctgcatttc

SEQ ID NO: 1913205 - DNA, 15 bp, Homo sapiens
cctgcctgcatttct

SEQ ID NO: 1913206 - DNA, 15 bp, Homo sapiens
ctgcctgcatttctt

SEQ ID NO: 1913207 - DNA, 15 bp, Homo sapiens
tgcctgcatttcttg

SEQ ID NO: 1913208 - DNA, 15 bp, Homo sapiens
gcctgcatttcttga

SEQ ID NO: 1913209 - DNA, 15 bp, Homo sapiens
cctgcatttcttgag

SEQ ID NO: 1913210 - DNA, 15 bp, Homo sapiens
ctgcatttcttgagg

SEQ ID NO: 1913211 - DNA, 15 bp, Homo sapiens
tgcatttcttgaggc

SEQ ID NO: 1913212 - DNA, 15 bp, Homo sapiens
gcatttcttgaggct

SEQ ID NO: 1913213 - DNA, 15 bp, Homo sapiens
catttcttgaggcta

SEQ ID NO: 1913214 - DNA, 15 bp, Homo sapiens
atttcttgaggctag

SEQ ID NO: 1913215 - DNA, 15 bp, Homo sapiens
tttcttgaggctagg

SEQ ID NO: 1913216 - DNA, 15 bp, Homo sapiens
ttcttgaggctaggg

SEQ ID NO: 1913217 - DNA, 15 bp, Homo sapiens
tcttgaggctagggg

SEQ ID NO: 1913218 - DNA, 15 bp, Homo sapiens
cttgaggctaggggc

SEQ ID NO: 1913219 - DNA, 15 bp, Homo sapiens
ttgaggctaggggcc

SEQ ID NO: 1913220 - DNA, 15 bp, Homo sapiens
tgaggctaggggccc

SEQ ID NO: 1913221 - DNA, 15 bp, Homo sapiens
gaggctaggggcccc

SEQ ID NO: 1913222 - DNA, 15 bp, Homo sapiens
aggctaggggccccc

SEQ ID NO: 1913223 - DNA, 15 bp, Homo sapiens
ggctaggggccccca

SEQ ID NO: 1913224 - DNA, 15 bp, Homo sapiens
gctaggggcccccat

SEQ ID NO: 1913225 - DNA, 15 bp, Homo sapiens
ctaggggcccccatc

SEQ ID NO: 1913226 - DNA, 15 bp, Homo sapiens
taggggcccccatct

SEQ ID NO: 1913227 - DNA, 15 bp, Homo sapiens
aggggcccccatctc

SEQ ID NO: 1913228 - DNA, 15 bp, Homo sapiens
ggggcccccatctct

SEQ ID NO: 1913229 - DNA, 15 bp, Homo sapiens
gggcccccatctctc

SEQ ID NO: 1913230 - DNA, 15 bp, Homo sapiens
ggcccccatctctcc

SEQ ID NO: 1913231 - DNA, 15 bp, Homo sapiens
gcccccatctctcct

SEQ ID NO: 1913232 - DNA, 15 bp, Homo sapiens
cccccatctctcctg

SEQ ID NO: 1913233 - DNA, 15 bp, Homo sapiens
ccccatctctcctgg

SEQ ID NO: 1913234 - DNA, 15 bp, Homo sapiens
cccatctctcctggt

SEQ ID NO: 1913235 - DNA, 15 bp, Homo sapiens
ccatctctcctggtt

SEQ ID NO: 1913236 - DNA, 15 bp, Homo sapiens
catctctcctggttg

SEQ ID NO: 1913237 - DNA, 15 bp, Homo sapiens
atctctcctggttgt

SEQ ID NO: 1913238 - DNA, 15 bp, Homo sapiens
tctctcctggttgta

SEQ ID NO: 1913239 - DNA, 15 bp, Homo sapiens
ctctcctggttgtag

SEQ ID NO: 1913240 - DNA, 15 bp, Homo sapiens
tctcctggttgtagg

SEQ ID NO: 1913241 - DNA, 15 bp, Homo sapiens
ctcctggttgtagga

SEQ ID NO: 1913242 - DNA, 15 bp, Homo sapiens
tcctggttgtaggag

SEQ ID NO: 1913243 - DNA, 15 bp, Homo sapiens
cctggttgtaggaga

SEQ ID NO: 1913244 - DNA, 15 bp, Homo sapiens
ctggttgtaggagag

SEQ ID NO: 1913245 - DNA, 15 bp, Homo sapiens
tggttgtaggagaga

SEQ ID NO: 1913246 - DNA, 15 bp, Homo sapiens
ggttgtaggagagag

SEQ ID NO: 1913247 - DNA, 15 bp, Homo sapiens
gttgtaggagagagt

SEQ ID NO: 1913248 - DNA, 15 bp, Homo sapiens
ttgtaggagagagtg

SEQ ID NO: 1913249 - DNA, 15 bp, Homo sapiens
tgtaggagagagtgg

SEQ ID NO: 1913250 - DNA, 15 bp, Homo sapiens
gtaggagagagtggt

SEQ ID NO: 1913251 - DNA, 15 bp, Homo sapiens
taggagagagtggtt

SEQ ID NO: 1913252 - DNA, 15 bp, Homo sapiens
aggagagagtggttg

SEQ ID NO: 1913253 - DNA, 15 bp, Homo sapiens
ggagagagtggttgg

SEQ ID NO: 1913254 - DNA, 15 bp, Homo sapiens
gagagagtggttggg

SEQ ID NO: 1913255 - DNA, 15 bp, Homo sapiens
agagagtggttgggg

SEQ ID NO: 1913256 - DNA, 15 bp, Homo sapiens
gagagtggttggggg

SEQ ID NO: 1913257 - DNA, 15 bp, Homo sapiens
agagtggttgggggt

SEQ ID NO: 1913258 - DNA, 15 bp, Homo sapiens
gagtggttgggggtg

SEQ ID NO: 1913259 - DNA, 15 bp, Homo sapiens
agtggttgggggtgg

SEQ ID NO: 1913260 - DNA, 15 bp, Homo sapiens
gtggttgggggtgga

SEQ ID NO: 1913261 - DNA, 15 bp, Homo sapiens
tggttgggggtggag

SEQ ID NO: 1913262 - DNA, 15 bp, Homo sapiens
ggttgggggtggaga

SEQ ID NO: 1913263 - DNA, 15 bp, Homo sapiens
gttgggggtggagag

SEQ ID NO: 1913264 - DNA, 15 bp, Homo sapiens
ttgggggtggagagt

SEQ ID NO: 1913265 - DNA, 15 bp, Homo sapiens
tgggggtggagagtg

SEQ ID NO: 1913266 - DNA, 15 bp, Homo sapiens
gggggtggagagtgg

SEQ ID NO: 1913267 - DNA, 15 bp, Homo sapiens
ggggtggagagtggg

SEQ ID NO: 1913268 - DNA, 15 bp, Homo sapiens
gggtggagagtgggg

SEQ ID NO: 1913269 - DNA, 15 bp, Homo sapiens
ggtggagagtggggt

SEQ ID NO: 1913270 - DNA, 15 bp, Homo sapiens
gtggagagtggggtg

SEQ ID NO: 1913271 - DNA, 15 bp, Homo sapiens
tggagagtggggtgc

SEQ ID NO: 1913272 - DNA, 15 bp, Homo sapiens
ggagagtggggtgct

SEQ ID NO: 1913273 - DNA, 15 bp, Homo sapiens
gagagtggggtgcta

SEQ ID NO: 1913274 - DNA, 15 bp, Homo sapiens
agagtggggtgctag

SEQ ID NO: 1913275 - DNA, 15 bp, Homo sapiens
gagtggggtgctagc

SEQ ID NO: 1913276 - DNA, 15 bp, Homo sapiens
agtggggtgctagcc

SEQ ID NO: 1913277 - DNA, 15 bp, Homo sapiens
gtggggtgctagccc

SEQ ID NO: 1913278 - DNA, 15 bp, Homo sapiens
tggggtgctagcccc

SEQ ID NO: 1913279 - DNA, 15 bp, Homo sapiens
ggggtgctagcccca

SEQ ID NO: 1913280 - DNA, 15 bp, Homo sapiens
gggtgctagccccag

SEQ ID NO: 1913281 - DNA, 15 bp, Homo sapiens
ggtgctagccccagg

SEQ ID NO: 1913282 - DNA, 15 bp, Homo sapiens
gtgctagccccaggc

SEQ ID NO: 1913283 - DNA, 15 bp, Homo sapiens
tgctagccccaggca

SEQ ID NO: 1913284 - DNA, 15 bp, Homo sapiens
gctagccccaggcag

SEQ ID NO: 1913285 - DNA, 15 bp, Homo sapiens
ctagccccaggcagt

SEQ ID NO: 1913286 - DNA, 15 bp, Homo sapiens
tagccccaggcagta

SEQ ID NO: 1913287 - DNA, 15 bp, Homo sapiens
agccccaggcagtaa

SEQ ID NO: 1913288 - DNA, 15 bp, Homo sapiens
gccccaggcagtaac

SEQ ID NO: 1913289 - DNA, 15 bp, Homo sapiens
ccccaggcagtaacc

SEQ ID NO: 1913290 - DNA, 15 bp, Homo sapiens
cccaggcagtaacct

SEQ ID NO: 1913291 - DNA, 15 bp, Homo sapiens
ccaggcagtaacctg

SEQ ID NO: 1913292 - DNA, 15 bp, Homo sapiens
caggcagtaacctgt

SEQ ID NO: 1913293 - DNA, 15 bp, Homo sapiens
aggcagtaacctgtc

SEQ ID NO: 1913294 - DNA, 15 bp, Homo sapiens
ggcagtaacctgtct

SEQ ID NO: 1913295 - DNA, 15 bp, Homo sapiens
gcagtaacctgtctg

SEQ ID NO: 1913296 - DNA, 15 bp, Homo sapiens
cagtaacctgtctgt

SEQ ID NO: 1913297 - DNA, 15 bp, Homo sapiens
agtaacctgtctgtg

SEQ ID NO: 1913298 - DNA, 15 bp, Homo sapiens
gtaacctgtctgtga

SEQ ID NO: 1913299 - DNA, 15 bp, Homo sapiens
taacctgtctgtgag

SEQ ID NO: 1913300 - DNA, 15 bp, Homo sapiens
aacctgtctgtgagg

SEQ ID NO: 1913301 - DNA, 15 bp, Homo sapiens
acctgtctgtgaggt

SEQ ID NO: 1913302 - DNA, 15 bp, Homo sapiens
cctgtctgtgaggtg

SEQ ID NO: 1913303 - DNA, 15 bp, Homo sapiens
ctgtctgtgaggtgg

SEQ ID NO: 1913304 - DNA, 15 bp, Homo sapiens
tgtctgtgaggtgga

SEQ ID NO: 1913305 - DNA, 15 bp, Homo sapiens
gtctgtgaggtggag

SEQ ID NO: 1913306 - DNA, 15 bp, Homo sapiens
tctgtgaggtggagg

SEQ ID NO: 1913307 - DNA, 15 bp, Homo sapiens
ctgtgaggtggagga

SEQ ID NO: 1913308 - DNA, 15 bp, Homo sapiens
tgtgaggtggaggag

SEQ ID NO: 1913309 - DNA, 15 bp, Homo sapiens
gtgaggtggaggagc

SEQ ID NO: 1913310 - DNA, 15 bp, Homo sapiens
tgaggtggaggagca

SEQ ID NO: 1913311 - DNA, 15 bp, Homo sapiens
gaggtggaggagcaa

SEQ ID NO: 1913312 - DNA, 15 bp, Homo sapiens
aggtggaggagcaac

SEQ ID NO: 1913313 - DNA, 15 bp, Homo sapiens
ggtggaggagcaaca

SEQ ID NO: 1913314 - DNA, 15 bp, Homo sapiens
gtggaggagcaacag

SEQ ID NO: 1913315 - DNA, 15 bp, Homo sapiens
tggaggagcaacaga

SEQ ID NO: 1913316 - DNA, 15 bp, Homo sapiens
ggaggagcaacagac

SEQ ID NO: 1913317 - DNA, 15 bp, Homo sapiens
gaggagcaacagacc

SEQ ID NO: 1913318 - DNA, 15 bp, Homo sapiens
aggagcaacagaccc

SEQ ID NO: 1913319 - DNA, 15 bp, Homo sapiens
ggagcaacagacccc

SEQ ID NO: 1913320 - DNA, 15 bp, Homo sapiens
gagcaacagaccccg

SEQ ID NO: 1913321 - DNA, 15 bp, Homo sapiens
agcaacagaccccgg

SEQ ID NO: 1913322 - DNA, 15 bp, Homo sapiens
gcaacagaccccggt

SEQ ID NO: 1913323 - DNA, 15 bp, Homo sapiens
caacagaccccggtg

SEQ ID NO: 1913324 - DNA, 15 bp, Homo sapiens
aacagaccccggtgg

SEQ ID NO: 1913325 - DNA, 15 bp, Homo sapiens
acagaccccggtggg

SEQ ID NO: 1913326 - DNA, 15 bp, Homo sapiens
ctgcacttcggcctt

SEQ ID NO: 1913327 - DNA, 15 bp, Homo sapiens
tgcacttcggccttg

SEQ ID NO: 1913328 - DNA, 15 bp, Homo sapiens
gcacttcggccttga

SEQ ID NO: 1913329 - DNA, 15 bp, Homo sapiens
cacttcggccttgaa

SEQ ID NO: 1913330 - DNA, 15 bp, Homo sapiens
acttcggccttgaat

SEQ ID NO: 1913331 - DNA, 15 bp, Homo sapiens
cttcggccttgaatt

SEQ ID NO: 1913332 - DNA, 15 bp, Homo sapiens
ttcggccttgaattt

SEQ ID NO: 1913333 - DNA, 15 bp, Homo sapiens
tcggccttgaatttc

SEQ ID NO: 1913334 - DNA, 15 bp, Homo sapiens
cggccttgaatttca

SEQ ID NO: 1913335 - DNA, 15 bp, Homo sapiens
ggccttgaatttcat

SEQ ID NO: 1913336 - DNA, 15 bp, Homo sapiens
gccttgaatttcatg

SEQ ID NO: 1913337 - DNA, 15 bp, Homo sapiens
ccttgaatttcatgt

SEQ ID NO: 1913338 - DNA, 15 bp, Homo sapiens
cttgaatttcatgtt

SEQ ID NO: 1913339 - DNA, 15 bp, Homo sapiens
ttgaatttcatgttg

SEQ ID NO: 1913340 - DNA, 15 bp, Homo sapiens
tgaatttcatgttga

SEQ ID NO: 1913341 - DNA, 15 bp, Homo sapiens
gaatttcatgttgag

SEQ ID NO: 1913342 - DNA, 15 bp, Homo sapiens
aatttcatgttgagc

SEQ ID NO: 1913343 - DNA, 15 bp, Homo sapiens
atttcatgttgagcg

SEQ ID NO: 1913344 - DNA, 15 bp, Homo sapiens
tttcatgttgagcgc

SEQ ID NO: 1913345 - DNA, 15 bp, Homo sapiens
ttcatgttgagcgcc

SEQ ID NO: 1913346 - DNA, 15 bp, Homo sapiens
tcatgttgagcgcct

SEQ ID NO: 1913347 - DNA, 15 bp, Homo sapiens
catgttgagcgcctc

SEQ ID NO: 1913348 - DNA, 15 bp, Homo sapiens
atgttgagcgcctca

SEQ ID NO: 1913349 - DNA, 15 bp, Homo sapiens
tgttgagcgcctcac

SEQ ID NO: 1913350 - DNA, 15 bp, Homo sapiens
gttgagcgcctcaca

SEQ ID NO: 1913351 - DNA, 15 bp, Homo sapiens
ttgagcgcctcacac

SEQ ID NO: 1913352 - DNA, 15 bp, Homo sapiens
tgagcgcctcacaca

SEQ ID NO: 1913353 - DNA, 15 bp, Homo sapiens
gagcgcctcacacag

SEQ ID NO: 1913354 - DNA, 15 bp, Homo sapiens
agcgcctcacacagc

SEQ ID NO: 1913355 - DNA, 15 bp, Homo sapiens
gcgcctcacacagct

SEQ ID NO: 1913356 - DNA, 15 bp, Homo sapiens
cgcctcacacagctg

SEQ ID NO: 1913357 - DNA, 15 bp, Homo sapiens
gcctcacacagctgc

SEQ ID NO: 1913358 - DNA, 15 bp, Homo sapiens
cctcacacagctgcg

SEQ ID NO: 1913359 - DNA, 15 bp, Homo sapiens
ctcacacagctgcgg

SEQ ID NO: 1913360 - DNA, 15 bp, Homo sapiens
tcacacagctgcggc

SEQ ID NO: 1913361 - DNA, 15 bp, Homo sapiens
cacacagctgcggcc

SEQ ID NO: 1913362 - DNA, 15 bp, Homo sapiens
acacagctgcggcca

SEQ ID NO: 1913363 - DNA, 15 bp, Homo sapiens
cacagctgcggccac

SEQ ID NO: 1913364 - DNA, 15 bp, Homo sapiens
acagctgcggccaca

SEQ ID NO: 1913365 - DNA, 15 bp, Homo sapiens
cagctgcggccacag

SEQ ID NO: 1913366 - DNA, 15 bp, Homo sapiens
agctgcggccacagc

SEQ ID NO: 1913367 - DNA, 15 bp, Homo sapiens
gctgcggccacagca

SEQ ID NO: 1913368 - DNA, 15 bp, Homo sapiens
ctgcggccacagcac

SEQ ID NO: 1913369 - DNA, 15 bp, Homo sapiens
tgcggccacagcact

SEQ ID NO: 1913370 - DNA, 15 bp, Homo sapiens
gcggccacagcactt

SEQ ID NO: 1913371 - DNA, 15 bp, Homo sapiens
cggccacagcacttt

SEQ ID NO: 1913372 - DNA, 15 bp, Homo sapiens
ggccacagcactttg

SEQ ID NO: 1913373 - DNA, 15 bp, Homo sapiens
gccacagcactttgt

SEQ ID NO: 1913374 - DNA, 15 bp, Homo sapiens
ccacagcactttgtc

SEQ ID NO: 1913375 - DNA, 15 bp, Homo sapiens
cacagcactttgtca

SEQ ID NO: 1913376 - DNA, 15 bp, Homo sapiens
acagcactttgtcag

SEQ ID NO: 1913377 - DNA, 15 bp, Homo sapiens
cagcactttgtcagg

SEQ ID NO: 1913378 - DNA, 15 bp, Homo sapiens
agcactttgtcaggc

SEQ ID NO: 1913379 - DNA, 15 bp, Homo sapiens
gcactttgtcaggca

SEQ ID NO: 1913380 - DNA, 15 bp, Homo sapiens
cactttgtcaggcac

SEQ ID NO: 1913381 - DNA, 15 bp, Homo sapiens
actttgtcaggcacg

SEQ ID NO: 1913382 - DNA, 15 bp, Homo sapiens
ctttgtcaggcacgg

SEQ ID NO: 1913383 - DNA, 15 bp, Homo sapiens
tttgtcaggcacggc

SEQ ID NO: 1913384 - DNA, 15 bp, Homo sapiens
ttgtcaggcacggca

SEQ ID NO: 1913385 - DNA, 15 bp, Homo sapiens
tgtcaggcacggcaa

SEQ ID NO: 1913386 - DNA, 15 bp, Homo sapiens
gtcaggcacggcaaa

SEQ ID NO: 1913387 - DNA, 15 bp, Homo sapiens
tcaggcacggcaaat

SEQ ID NO: 1913388 - DNA, 15 bp, Homo sapiens
caggcacggcaaatg

SEQ ID NO: 1913389 - DNA, 15 bp, Homo sapiens
aggcacggcaaatgg

SEQ ID NO: 1913390 - DNA, 15 bp, Homo sapiens
ggcacggcaaatggc

SEQ ID NO: 1913391 - DNA, 15 bp, Homo sapiens
gcacggcaaatggca

SEQ ID NO: 1913392 - DNA, 15 bp, Homo sapiens
cacggcaaatggcac

SEQ ID NO: 1913393 - DNA, 15 bp, Homo sapiens
acggcaaatggcacc

SEQ ID NO: 1913394 - DNA, 15 bp, Homo sapiens
cggcaaatggcaccc

SEQ ID NO: 1913395 - DNA, 15 bp, Homo sapiens
ggcaaatggcaccct

SEQ ID NO: 1913396 - DNA, 15 bp, Homo sapiens
gcaaatggcaccctg

SEQ ID NO: 1913397 - DNA, 15 bp, Homo sapiens
caaatggcaccctgc

SEQ ID NO: 1913398 - DNA, 15 bp, Homo sapiens
aaatggcaccctgcc

SEQ ID NO: 1913399 - DNA, 15 bp, Homo sapiens
aatggcaccctgccc

SEQ ID NO: 1913400 - DNA, 15 bp, Homo sapiens
atggcaccctgccct

SEQ ID NO: 1913401 - DNA, 15 bp, Homo sapiens
tggcaccctgccctg

SEQ ID NO: 1913402 - DNA, 15 bp, Homo sapiens
ggcaccctgccctga

SEQ ID NO: 1913403 - DNA, 15 bp, Homo sapiens
gcaccctgccctgag

SEQ ID NO: 1913404 - DNA, 15 bp, Homo sapiens
caccctgccctgaga

SEQ ID NO: 1913405 - DNA, 15 bp, Homo sapiens
accctgccctgagag

SEQ ID NO: 1913406 - DNA, 15 bp, Homo sapiens
ccctgccctgagagg

SEQ ID NO: 1913407 - DNA, 15 bp, Homo sapiens
cctgccctgagaggg

SEQ ID NO: 1913408 - DNA, 15 bp, Homo sapiens
ctgccctgagaggga

SEQ ID NO: 1913409 - DNA, 15 bp, Homo sapiens
tgccctgagagggag

SEQ ID NO: 1913410 - DNA, 15 bp, Homo sapiens
gccctgagagggaga

SEQ ID NO: 1913411 - DNA, 15 bp, Homo sapiens
ccctgagagggagac

SEQ ID NO: 1913412 - DNA, 15 bp, Homo sapiens
cctgagagggagaca

SEQ ID NO: 1913413 - DNA, 15 bp, Homo sapiens
ctgagagggagacaa

SEQ ID NO: 1913414 - DNA, 15 bp, Homo sapiens
tgagagggagacaag

SEQ ID NO: 1913415 - DNA, 15 bp, Homo sapiens
gagagggagacaaga

SEQ ID NO: 1913416 - DNA, 15 bp, Homo sapiens
agagggagacaagag

SEQ ID NO: 1913417 - DNA, 15 bp, Homo sapiens
gagggagacaagaga

SEQ ID NO: 1913418 - DNA, 15 bp, Homo sapiens
agggagacaagagag

SEQ ID NO: 1913419 - DNA, 15 bp, Homo sapiens
gggagacaagagagg

SEQ ID NO: 1913420 - DNA, 15 bp, Homo sapiens
ggagacaagagaggg

SEQ ID NO: 1913421 - DNA, 15 bp, Homo sapiens
gagacaagagagggg

SEQ ID NO: 1913422 - DNA, 15 bp, Homo sapiens
agacaagagagggga

SEQ ID NO: 1913423 - DNA, 15 bp, Homo sapiens
gacaagagaggggaa

SEQ ID NO: 1913424 - DNA, 15 bp, Homo sapiens
acaagagaggggaaa

SEQ ID NO: 1913425 - DNA, 15 bp, Homo sapiens
caagagaggggaaaa

SEQ ID NO: 1913426 - DNA, 15 bp, Homo sapiens
aagagaggggaaaag

SEQ ID NO: 1913427 - DNA, 15 bp, Homo sapiens
agagaggggaaaagg

SEQ ID NO: 1913428 - DNA, 15 bp, Homo sapiens
gagaggggaaaaggt

SEQ ID NO: 1913429 - DNA, 15 bp, Homo sapiens
agaggggaaaaggta

SEQ ID NO: 1913430 - DNA, 15 bp, Homo sapiens
gaggggaaaaggtag

SEQ ID NO: 1913431 - DNA, 15 bp, Homo sapiens
aggggaaaaggtaga

SEQ ID NO: 1913432 - DNA, 15 bp, Homo sapiens
ggggaaaaggtagat

SEQ ID NO: 1913433 - DNA, 15 bp, Homo sapiens
gggaaaaggtagatt

SEQ ID NO: 1913434 - DNA, 15 bp, Homo sapiens
ggaaaaggtagattg

SEQ ID NO: 1913435 - DNA, 15 bp, Homo sapiens
gaaaaggtagattga

SEQ ID NO: 1913436 - DNA, 15 bp, Homo sapiens
aaaaggtagattgag

SEQ ID NO: 1913437 - DNA, 15 bp, Homo sapiens
aaaggtagattgagg

SEQ ID NO: 1913438 - DNA, 15 bp, Homo sapiens
aaggtagattgaggg

SEQ ID NO: 1913439 - DNA, 15 bp, Homo sapiens
aggtagattgaggga

SEQ ID NO: 1913440 - DNA, 15 bp, Homo sapiens
ggtagattgagggag

SEQ ID NO: 1913441 - DNA, 15 bp, Homo sapiens
gtagattgagggagt

SEQ ID NO: 1913442 - DNA, 15 bp, Homo sapiens
tagattgagggagtt

SEQ ID NO: 1913443 - DNA, 15 bp, Homo sapiens
agattgagggagttg

SEQ ID NO: 1913444 - DNA, 15 bp, Homo sapiens
gattgagggagttgg

SEQ ID NO: 1913445 - DNA, 15 bp, Homo sapiens
attgagggagttgga

SEQ ID NO: 1913446 - DNA, 15 bp, Homo sapiens
ttgagggagttggaa

SEQ ID NO: 1913447 - DNA, 15 bp, Homo sapiens
tgagggagttggaaa

SEQ ID NO: 1913448 - DNA, 15 bp, Homo sapiens
gagggagttggaaat

SEQ ID NO: 1913449 - DNA, 15 bp, Homo sapiens
agggagttggaaata

SEQ ID NO: 1913450 - DNA, 15 bp, Homo sapiens
gggagttggaaatat

SEQ ID NO: 1913451 - DNA, 15 bp, Homo sapiens
ggagttggaaatatt

SEQ ID NO: 1913452 - DNA, 15 bp, Homo sapiens
gagttggaaatattc

SEQ ID NO: 1913453 - DNA, 15 bp, Homo sapiens
agttggaaatattca

SEQ ID NO: 1913454 - DNA, 15 bp, Homo sapiens
gttggaaatattcac

SEQ ID NO: 1913455 - DNA, 15 bp, Homo sapiens
ttggaaatattcaca

SEQ ID NO: 1913456 - DNA, 15 bp, Homo sapiens
tggaaatattcacac

SEQ ID NO: 1913457 - DNA, 15 bp, Homo sapiens
ggaaatattcacaca

SEQ ID NO: 1913458 - DNA, 15 bp, Homo sapiens
gaaatattcacacac

SEQ ID NO: 1913459 - DNA, 15 bp, Homo sapiens
aaatattcacacaca

SEQ ID NO: 1913460 - DNA, 15 bp, Homo sapiens
aatattcacacacac

SEQ ID NO: 1913461 - DNA, 15 bp, Homo sapiens
atattcacacacaca

SEQ ID NO: 1913462 - DNA, 15 bp, Homo sapiens
tattcacacacacac

SEQ ID NO: 1913463 - DNA, 15 bp, Homo sapiens
attcacacacacaca

SEQ ID NO: 1913464 - DNA, 15 bp, Homo sapiens
ttcacacacacacaa

SEQ ID NO: 1913465 - DNA, 15 bp, Homo sapiens
tcacacacacacaag

SEQ ID NO: 1913466 - DNA, 15 bp, Homo sapiens
cacacacacacaaga

SEQ ID NO: 1913467 - DNA, 15 bp, Homo sapiens
acacacacacaagat

SEQ ID NO: 1913468 - DNA, 15 bp, Homo sapiens
cacacacacaagata

SEQ ID NO: 1913469 - DNA, 15 bp, Homo sapiens
acacacacaagatac

SEQ ID NO: 1913470 - DNA, 15 bp, Homo sapiens
cacacacaagataca

SEQ ID NO: 1913471 - DNA, 15 bp, Homo sapiens
acacacaagatacac

SEQ ID NO: 1913472 - DNA, 15 bp, Homo sapiens
cacacaagatacaca

SEQ ID NO: 1913473 - DNA, 15 bp, Homo sapiens
acacaagatacacag

SEQ ID NO: 1913474 - DNA, 15 bp, Homo sapiens
cacaagatacacaga

SEQ ID NO: 1913475 - DNA, 15 bp, Homo sapiens
acaagatacacagac

SEQ ID NO: 1913476 - DNA, 15 bp, Homo sapiens
caagatacacagaca

SEQ ID NO: 1913477 - DNA, 15 bp, Homo sapiens
aagatacacagacac

SEQ ID NO: 1913478 - DNA, 15 bp, Homo sapiens
agatacacagacacc

SEQ ID NO: 1913479 - DNA, 15 bp, Homo sapiens
gatacacagacacct

SEQ ID NO: 1913480 - DNA, 15 bp, Homo sapiens
atacacagacaccta

SEQ ID NO: 1913481 - DNA, 15 bp, Homo sapiens
tacacagacacctag

SEQ ID NO: 1913482 - DNA, 15 bp, Homo sapiens
acacagacacctaga

SEQ ID NO: 1913483 - DNA, 15 bp, Homo sapiens
cacagacacctagag

SEQ ID NO: 1913484 - DNA, 15 bp, Homo sapiens
acagacacctagaga

SEQ ID NO: 1913485 - DNA, 15 bp, Homo sapiens
cagacacctagagac

SEQ ID NO: 1913486 - DNA, 15 bp, Homo sapiens
agacacctagagaca

SEQ ID NO: 1913487 - DNA, 15 bp, Homo sapiens
gacacctagagacag

SEQ ID NO: 1913488 - DNA, 15 bp, Homo sapiens
acacctagagacaga

SEQ ID NO: 1913489 - DNA, 15 bp, Homo sapiens
cacctagagacagag

SEQ ID NO: 1913490 - DNA, 15 bp, Homo sapiens
acctagagacagagg

SEQ ID NO: 1913491 - DNA, 15 bp, Homo sapiens
cctagagacagagga

SEQ ID NO: 1913492 - DNA, 15 bp, Homo sapiens
ctagagacagaggag

SEQ ID NO: 1913493 - DNA, 15 bp, Homo sapiens
tagagacagaggaga

SEQ ID NO: 1913494 - DNA, 15 bp, Homo sapiens
agagacagaggagac

SEQ ID NO: 1913495 - DNA, 15 bp, Homo sapiens
gagacagaggagact

SEQ ID NO: 1913496 - DNA, 15 bp, Homo sapiens
agacagaggagactg

SEQ ID NO: 1913497 - DNA, 15 bp, Homo sapiens
gacagaggagactga

SEQ ID NO: 1913498 - DNA, 15 bp, Homo sapiens
acagaggagactgag

SEQ ID NO: 1913499 - DNA, 15 bp, Homo sapiens
cagaggagactgaga

SEQ ID NO: 1913500 - DNA, 15 bp, Homo sapiens
agaggagactgagac

SEQ ID NO: 1913501 - DNA, 15 bp, Homo sapiens
gaggagactgagaca

SEQ ID NO: 1913502 - DNA, 15 bp, Homo sapiens
aggagactgagacag

SEQ ID NO: 1913503 - DNA, 15 bp, Homo sapiens
ggagactgagacaga

SEQ ID NO: 1913504 - DNA, 15 bp, Homo sapiens
gagactgagacagat

SEQ ID NO: 1913505 - DNA, 15 bp, Homo sapiens
agactgagacagatc

SEQ ID NO: 1913506 - DNA, 15 bp, Homo sapiens
gactgagacagatcc

SEQ ID NO: 1913507 - DNA, 15 bp, Homo sapiens
actgagacagatcca

SEQ ID NO: 1913508 - DNA, 15 bp, Homo sapiens
ctgagacagatccag

SEQ ID NO: 1913509 - DNA, 15 bp, Homo sapiens
tgagacagatccaga

SEQ ID NO: 1913510 - DNA, 15 bp, Homo sapiens
gagacagatccagaa

SEQ ID NO: 1913511 - DNA, 15 bp, Homo sapiens
agacagatccagaaa

SEQ ID NO: 1913512 - DNA, 15 bp, Homo sapiens
gacagatccagaaag

SEQ ID NO: 1913513 - DNA, 15 bp, Homo sapiens
acagatccagaaagg

SEQ ID NO: 1913514 - DNA, 15 bp, Homo sapiens
cagatccagaaaggt

SEQ ID NO: 1913515 - DNA, 15 bp, Homo sapiens
agatccagaaaggtg

SEQ ID NO: 1913516 - DNA, 15 bp, Homo sapiens
gatccagaaaggtga

SEQ ID NO: 1913517 - DNA, 15 bp, Homo sapiens
atccagaaaggtgac

SEQ ID NO: 1913518 - DNA, 15 bp, Homo sapiens
tccagaaaggtgaca

SEQ ID NO: 1913519 - DNA, 15 bp, Homo sapiens
ccagaaaggtgacac

SEQ ID NO: 1913520 - DNA, 15 bp, Homo sapiens
cagaaaggtgacaca

SEQ ID NO: 1913521 - DNA, 15 bp, Homo sapiens
agaaaggtgacacaa

SEQ ID NO: 1913522 - DNA, 15 bp, Homo sapiens
gaaaggtgacacaaa

SEQ ID NO: 1913523 - DNA, 15 bp, Homo sapiens
aaaggtgacacaaat

SEQ ID NO: 1913524 - DNA, 15 bp, Homo sapiens
aaggtgacacaaatg

SEQ ID NO: 1913525 - DNA, 15 bp, Homo sapiens
aggtgacacaaatgc

SEQ ID NO: 1913526 - DNA, 15 bp, Homo sapiens
ggtgacacaaatgca

SEQ ID NO: 1913527 - DNA, 15 bp, Homo sapiens
gtgacacaaatgcaa

SEQ ID NO: 1913528 - DNA, 15 bp, Homo sapiens
tgacacaaatgcaag

SEQ ID NO: 1913529 - DNA, 15 bp, Homo sapiens
gacacaaatgcaagg

SEQ ID NO: 1913530 - DNA, 15 bp, Homo sapiens
acacaaatgcaaggg

SEQ ID NO: 1913531 - DNA, 15 bp, Homo sapiens
cacaaatgcaagggc

SEQ ID NO: 1913532 - DNA, 15 bp, Homo sapiens
acaaatgcaagggca

SEQ ID NO: 1913533 - DNA, 15 bp, Homo sapiens
caaatgcaagggcag

SEQ ID NO: 1913534 - DNA, 15 bp, Homo sapiens
aaatgcaagggcagg

SEQ ID NO: 1913535 - DNA, 15 bp, Homo sapiens
aatgcaagggcagga

SEQ ID NO: 1913536 - DNA, 15 bp, Homo sapiens
atgcaagggcaggaa

SEQ ID NO: 1913537 - DNA, 15 bp, Homo sapiens
tgcaagggcaggaaa

SEQ ID NO: 1913538 - DNA, 15 bp, Homo sapiens
gcaagggcaggaaat

SEQ ID NO: 1913539 - DNA, 15 bp, Homo sapiens
caagggcaggaaatg

SEQ ID NO: 1913540 - DNA, 15 bp, Homo sapiens
aagggcaggaaatgc

SEQ ID NO: 1913541 - DNA, 15 bp, Homo sapiens
agggcaggaaatgcg

SEQ ID NO: 1913542 - DNA, 15 bp, Homo sapiens
gggcaggaaatgcgg

SEQ ID NO: 1913543 - DNA, 15 bp, Homo sapiens
ggcaggaaatgcggc

SEQ ID NO: 1913544 - DNA, 15 bp, Homo sapiens
gcaggaaatgcggcg

SEQ ID NO: 1913545 - DNA, 15 bp, Homo sapiens
caggaaatgcggcgg

SEQ ID NO: 1913546 - DNA, 15 bp, Homo sapiens
aggaaatgcggcggc

SEQ ID NO: 1913547 - DNA, 15 bp, Homo sapiens
ggaaatgcggcggct

SEQ ID NO: 1913548 - DNA, 15 bp, Homo sapiens
gaaatgcggcggctt

SEQ ID NO: 1913549 - DNA, 15 bp, Homo sapiens
aaatgcggcggcttt

SEQ ID NO: 1913550 - DNA, 15 bp, Homo sapiens
aatgcggcggctttt

SEQ ID NO: 1913551 - DNA, 15 bp, Homo sapiens
atgcggcggctttta

SEQ ID NO: 1913552 - DNA, 15 bp, Homo sapiens
tgcggcggcttttat

SEQ ID NO: 1913553 - DNA, 15 bp, Homo sapiens
gcggcggcttttata

SEQ ID NO: 1913554 - DNA, 15 bp, Homo sapiens
cggcggcttttatat

SEQ ID NO: 1913555 - DNA, 15 bp, Homo sapiens
ggcggcttttatata

SEQ ID NO: 1913556 - DNA, 15 bp, Homo sapiens
gcggcttttatatac

SEQ ID NO: 1913557 - DNA, 15 bp, Homo sapiens
cggcttttatatact

SEQ ID NO: 1913558 - DNA, 15 bp, Homo sapiens
ggcttttatatacta

SEQ ID NO: 1913559 - DNA, 15 bp, Homo sapiens
gcttttatatactag

SEQ ID NO: 1913560 - DNA, 15 bp, Homo sapiens
cttttatatactagc

SEQ ID NO: 1913561 - DNA, 15 bp, Homo sapiens
ttttatatactagct

SEQ ID NO: 1913562 - DNA, 15 bp, Homo sapiens
tttatatactagctt

SEQ ID NO: 1913563 - DNA, 15 bp, Homo sapiens
ttatatactagcttg

SEQ ID NO: 1913564 - DNA, 15 bp, Homo sapiens
tatatactagcttgc

SEQ ID NO: 1913565 - DNA, 15 bp, Homo sapiens
atatactagcttgca

SEQ ID NO: 1913566 - DNA, 15 bp, Homo sapiens
tatactagcttgcac

SEQ ID NO: 1913567 - DNA, 15 bp, Homo sapiens
atactagcttgcact

SEQ ID NO: 1913568 - DNA, 15 bp, Homo sapiens
tactagcttgcactt

SEQ ID NO: 1913569 - DNA, 15 bp, Homo sapiens
actagcttgcacttt

SEQ ID NO: 1913570 - DNA, 15 bp, Homo sapiens
ctagcttgcactttt

SEQ ID NO: 1913571 - DNA, 15 bp, Homo sapiens
tagcttgcacttttt

SEQ ID NO: 1913572 - DNA, 15 bp, Homo sapiens
agcttgcactttttt

SEQ ID NO: 1913573 - DNA, 15 bp, Homo sapiens
gcttgcacttttttt

SEQ ID NO: 1913574 - DNA, 15 bp, Homo sapiens
cttgcactttttttc

SEQ ID NO: 1913575 - DNA, 15 bp, Homo sapiens
ttgcactttttttcc

SEQ ID NO: 1913576 - DNA, 15 bp, Homo sapiens
tgcactttttttccc

SEQ ID NO: 1913577 - DNA, 15 bp, Homo sapiens
gcactttttttccca

SEQ ID NO: 1913578 - DNA, 15 bp, Homo sapiens
cactttttttcccag

SEQ ID NO: 1913579 - DNA, 15 bp, Homo sapiens
actttttttcccagc

SEQ ID NO: 1913580 - DNA, 15 bp, Homo sapiens
ctttttttcccagcc

SEQ ID NO: 1913581 - DNA, 15 bp, Homo sapiens
tttttttcccagcct

SEQ ID NO: 1913582 - DNA, 15 bp, Homo sapiens
ttttttcccagcctg

SEQ ID NO: 1913583 - DNA, 15 bp, Homo sapiens
tttttcccagcctgc

SEQ ID NO: 1913584 - DNA, 15 bp, Homo sapiens
ttttcccagcctgca

SEQ ID NO: 1913585 - DNA, 15 bp, Homo sapiens
tttcccagcctgcag

SEQ ID NO: 1913586 - DNA, 15 bp, Homo sapiens
ttcccagcctgcagg

SEQ ID NO: 1913587 - DNA, 15 bp, Homo sapiens
tcccagcctgcaggg

SEQ ID NO: 1913588 - DNA, 15 bp, Homo sapiens
cccagcctgcaggga

SEQ ID NO: 1913589 - DNA, 15 bp, Homo sapiens
ccagcctgcagggaa

SEQ ID NO: 1913590 - DNA, 15 bp, Homo sapiens
cagcctgcagggaag

SEQ ID NO: 1913591 - DNA, 15 bp, Homo sapiens
agcctgcagggaaga

SEQ ID NO: 1913592 - DNA, 15 bp, Homo sapiens
gcctgcagggaagaa

SEQ ID NO: 1913593 - DNA, 15 bp, Homo sapiens
cctgcagggaagaaa

SEQ ID NO: 1913594 - DNA, 15 bp, Homo sapiens
ctgcagggaagaaaa

SEQ ID NO: 1913595 - DNA, 15 bp, Homo sapiens
tgcagggaagaaaac

SEQ ID NO: 1913596 - DNA, 15 bp, Homo sapiens
gcagggaagaaaacc

SEQ ID NO: 1913597 - DNA, 15 bp, Homo sapiens
cagggaagaaaaccg

SEQ ID NO: 1913598 - DNA, 15 bp, Homo sapiens
agggaagaaaaccga

SEQ ID NO: 1913599 - DNA, 15 bp, Homo sapiens
gggaagaaaaccgat

SEQ ID NO: 1913600 - DNA, 15 bp, Homo sapiens
ggaagaaaaccgatg

SEQ ID NO: 1913601 - DNA, 15 bp, Homo sapiens
gaagaaaaccgatgc

SEQ ID NO: 1913602 - DNA, 15 bp, Homo sapiens
aagaaaaccgatgca

SEQ ID NO: 1913603 - DNA, 15 bp, Homo sapiens
agaaaaccgatgcag

SEQ ID NO: 1913604 - DNA, 15 bp, Homo sapiens
gaaaaccgatgcagg

SEQ ID NO: 1913605 - DNA, 15 bp, Homo sapiens
aaaaccgatgcaggg

SEQ ID NO: 1913606 - DNA, 15 bp, Homo sapiens
aaaccgatgcagggg

SEQ ID NO: 1913607 - DNA, 15 bp, Homo sapiens
aaccgatgcaggggg

SEQ ID NO: 1913608 - DNA, 15 bp, Homo sapiens
accgatgcagggggt

SEQ ID NO: 1913609 - DNA, 15 bp, Homo sapiens
ccgatgcagggggtg

SEQ ID NO: 1913610 - DNA, 15 bp, Homo sapiens
cgatgcagggggtgg

SEQ ID NO: 1913611 - DNA, 15 bp, Homo sapiens
gatgcagggggtggg

SEQ ID NO: 1913612 - DNA, 15 bp, Homo sapiens
atgcagggggtgggg

SEQ ID NO: 1913613 - DNA, 15 bp, Homo sapiens
tgcagggggtggggg

SEQ ID NO: 1913614 - DNA, 15 bp, Homo sapiens
gcagggggtgggggc

SEQ ID NO: 1913615 - DNA, 15 bp, Homo sapiens
cagggggtgggggca

SEQ ID NO: 1913616 - DNA, 15 bp, Homo sapiens
agggggtgggggcat

SEQ ID NO: 1913617 - DNA, 15 bp, Homo sapiens
gggggtgggggcatg

SEQ ID NO: 1913618 - DNA, 15 bp, Homo sapiens
ggggtgggggcatgc

SEQ ID NO: 1913619 - DNA, 15 bp, Homo sapiens
gggtgggggcatgca

SEQ ID NO: 1913620 - DNA, 15 bp, Homo sapiens
ggtgggggcatgcag

SEQ ID NO: 1913621 - DNA, 15 bp, Homo sapiens
gtgggggcatgcagg

SEQ ID NO: 1913622 - DNA, 15 bp, Homo sapiens
tgggggcatgcaggg

SEQ ID NO: 1913623 - DNA, 15 bp, Homo sapiens
gggggcatgcaggga

SEQ ID NO: 1913624 - DNA, 15 bp, Homo sapiens
ggggcatgcagggac

SEQ ID NO: 1913625 - DNA, 15 bp, Homo sapiens
gggcatgcagggaca

SEQ ID NO: 1913626 - DNA, 15 bp, Homo sapiens
ggcatgcagggacag

SEQ ID NO: 1913627 - DNA, 15 bp, Homo sapiens
gcatgcagggacaga

SEQ ID NO: 1913628 - DNA, 15 bp, Homo sapiens
catgcagggacagag

SEQ ID NO: 1913629 - DNA, 15 bp, Homo sapiens
atgcagggacagaga

SEQ ID NO: 1913630 - DNA, 15 bp, Homo sapiens
tgcagggacagagat

SEQ ID NO: 1913631 - DNA, 15 bp, Homo sapiens
gcagggacagagatg

SEQ ID NO: 1913632 - DNA, 15 bp, Homo sapiens
cagggacagagatgc

SEQ ID NO: 1913633 - DNA, 15 bp, Homo sapiens
agggacagagatgca

SEQ ID NO: 1913634 - DNA, 15 bp, Homo sapiens
gggacagagatgcag

SEQ ID NO: 1913635 - DNA, 15 bp, Homo sapiens
ggacagagatgcaga

SEQ ID NO: 1913636 - DNA, 15 bp, Homo sapiens
gacagagatgcagac

SEQ ID NO: 1913637 - DNA, 15 bp, Homo sapiens
acagagatgcagacc

SEQ ID NO: 1913638 - DNA, 15 bp, Homo sapiens
cagagatgcagacca

SEQ ID NO: 1913639 - DNA, 15 bp, Homo sapiens
agagatgcagaccag

SEQ ID NO: 1913640 - DNA, 15 bp, Homo sapiens
gagatgcagaccagg

SEQ ID NO: 1913641 - DNA, 15 bp, Homo sapiens
agatgcagaccagga

SEQ ID NO: 1913642 - DNA, 15 bp, Homo sapiens
gatgcagaccaggaa

SEQ ID NO: 1913643 - DNA, 15 bp, Homo sapiens
atgcagaccaggaaa

SEQ ID NO: 1913644 - DNA, 15 bp, Homo sapiens
tgcagaccaggaaac

SEQ ID NO: 1913645 - DNA, 15 bp, Homo sapiens
gcagaccaggaaaca

SEQ ID NO: 1913646 - DNA, 15 bp, Homo sapiens
cagaccaggaaacag

SEQ ID NO: 1913647 - DNA, 15 bp, Homo sapiens
agaccaggaaacaga

SEQ ID NO: 1913648 - DNA, 15 bp, Homo sapiens
gaccaggaaacagaa

SEQ ID NO: 1913649 - DNA, 15 bp, Homo sapiens
accaggaaacagaaa

SEQ ID NO: 1913650 - DNA, 15 bp, Homo sapiens
ccaggaaacagaaaa

SEQ ID NO: 1913651 - DNA, 15 bp, Homo sapiens
caggaaacagaaaac

SEQ ID NO: 1913652 - DNA, 15 bp, Homo sapiens
aggaaacagaaaaca

SEQ ID NO: 1913653 - DNA, 15 bp, Homo sapiens
ggaaacagaaaacag

SEQ ID NO: 1913654 - DNA, 15 bp, Homo sapiens
gaaacagaaaacaga

SEQ ID NO: 1913655 - DNA, 15 bp, Homo sapiens
aaacagaaaacagag

SEQ ID NO: 1913656 - DNA, 15 bp, Homo sapiens
aacagaaaacagaga

SEQ ID NO: 1913657 - DNA, 15 bp, Homo sapiens
acagaaaacagagag

SEQ ID NO: 1913658 - DNA, 15 bp, Homo sapiens
cagaaaacagagagc

SEQ ID NO: 1913659 - DNA, 15 bp, Homo sapiens
agaaaacagagagca

SEQ ID NO: 1913660 - DNA, 15 bp, Homo sapiens
gaaaacagagagcaa

SEQ ID NO: 1913661 - DNA, 15 bp, Homo sapiens
aaaacagagagcaag

SEQ ID NO: 1913662 - DNA, 15 bp, Homo sapiens
aaacagagagcaagg

SEQ ID NO: 1913663 - DNA, 15 bp, Homo sapiens
aacagagagcaagga

SEQ ID NO: 1913664 - DNA, 15 bp, Homo sapiens
acagagagcaaggac

SEQ ID NO: 1913665 - DNA, 15 bp, Homo sapiens
cagagagcaaggacc

SEQ ID NO: 1913666 - DNA, 15 bp, Homo sapiens
agagagcaaggaccc

SEQ ID NO: 1913667 - DNA, 15 bp, Homo sapiens
gagagcaaggaccca

SEQ ID NO: 1913668 - DNA, 15 bp, Homo sapiens
agagcaaggacccaa

SEQ ID NO: 1913669 - DNA, 15 bp, Homo sapiens
gagcaaggacccaag

SEQ ID NO: 1913670 - DNA, 15 bp, Homo sapiens
agcaaggacccaagc

SEQ ID NO: 1913671 - DNA, 15 bp, Homo sapiens
gcaaggacccaagcc

SEQ ID NO: 1913672 - DNA, 15 bp, Homo sapiens
caaggacccaagcca

SEQ ID NO: 1913673 - DNA, 15 bp, Homo sapiens
aaggacccaagccat

SEQ ID NO: 1913674 - DNA, 15 bp, Homo sapiens
aggacccaagccatc

SEQ ID NO: 1913675 - DNA, 15 bp, Homo sapiens
ggacccaagccatct

SEQ ID NO: 1913676 - DNA, 15 bp, Homo sapiens
gacccaagccatctg

SEQ ID NO: 1913677 - DNA, 15 bp, Homo sapiens
acccaagccatctgc

SEQ ID NO: 1913678 - DNA, 15 bp, Homo sapiens
cccaagccatctgcc

SEQ ID NO: 1913679 - DNA, 15 bp, Homo sapiens
ccaagccatctgcca

SEQ ID NO: 1913680 - DNA, 15 bp, Homo sapiens
caagccatctgccaa

SEQ ID NO: 1913681 - DNA, 15 bp, Homo sapiens
aagccatctgccaaa

SEQ ID NO: 1913682 - DNA, 15 bp, Homo sapiens
agccatctgccaaag

SEQ ID NO: 1913683 - DNA, 15 bp, Homo sapiens
gccatctgccaaagg

SEQ ID NO: 1913684 - DNA, 15 bp, Homo sapiens
ccatctgccaaagga

SEQ ID NO: 1913685 - DNA, 15 bp, Homo sapiens
catctgccaaaggag

SEQ ID NO: 1913686 - DNA, 15 bp, Homo sapiens
atctgccaaaggagg

SEQ ID NO: 1913687 - DNA, 15 bp, Homo sapiens
tctgccaaaggagga

SEQ ID NO: 1913688 - DNA, 15 bp, Homo sapiens
ctgccaaaggaggat

SEQ ID NO: 1913689 - DNA, 15 bp, Homo sapiens
tgccaaaggaggatc

SEQ ID NO: 1913690 - DNA, 15 bp, Homo sapiens
gccaaaggaggatcc

SEQ ID NO: 1913691 - DNA, 15 bp, Homo sapiens
ccaaaggaggatccc

SEQ ID NO: 1913692 - DNA, 15 bp, Homo sapiens
caaaggaggatccca

SEQ ID NO: 1913693 - DNA, 15 bp, Homo sapiens
aaaggaggatcccag

SEQ ID NO: 1913694 - DNA, 15 bp, Homo sapiens
aaggaggatcccaga

SEQ ID NO: 1913695 - DNA, 15 bp, Homo sapiens
aggaggatcccagac

SEQ ID NO: 1913696 - DNA, 15 bp, Homo sapiens
ggaggatcccagacc

SEQ ID NO: 1913697 - DNA, 15 bp, Homo sapiens
gaggatcccagacca

SEQ ID NO: 1913698 - DNA, 15 bp, Homo sapiens
aggatcccagaccag

SEQ ID NO: 1913699 - DNA, 15 bp, Homo sapiens
ggatcccagaccagg

SEQ ID NO: 1913700 - DNA, 15 bp, Homo sapiens
gatcccagaccagga

SEQ ID NO: 1913701 - DNA, 15 bp, Homo sapiens
atcccagaccaggat

SEQ ID NO: 1913702 - DNA, 15 bp, Homo sapiens
tcccagaccaggatc

SEQ ID NO: 1913703 - DNA, 15 bp, Homo sapiens
cccagaccaggatcc

SEQ ID NO: 1913704 - DNA, 15 bp, Homo sapiens
ccagaccaggatcca

SEQ ID NO: 1913705 - DNA, 15 bp, Homo sapiens
cagaccaggatccaa

SEQ ID NO: 1913706 - DNA, 15 bp, Homo sapiens
agaccaggatccaaa

SEQ ID NO: 1913707 - DNA, 15 bp, Homo sapiens
gaccaggatccaaag

SEQ ID NO: 1913708 - DNA, 15 bp, Homo sapiens
accaggatccaaaga

SEQ ID NO: 1913709 - DNA, 15 bp, Homo sapiens
ccaggatccaaagac

SEQ ID NO: 1913710 - DNA, 15 bp, Homo sapiens
caggatccaaagacc

SEQ ID NO: 1913711 - DNA, 15 bp, Homo sapiens
aggatccaaagacca

SEQ ID NO: 1913712 - DNA, 15 bp, Homo sapiens
ggatccaaagaccaa

SEQ ID NO: 1913713 - DNA, 15 bp, Homo sapiens
gatccaaagaccaag

SEQ ID NO: 1913714 - DNA, 15 bp, Homo sapiens
atccaaagaccaagc

SEQ ID NO: 1913715 - DNA, 15 bp, Homo sapiens
tccaaagaccaagct

SEQ ID NO: 1913716 - DNA, 15 bp, Homo sapiens
ccaaagaccaagctc

SEQ ID NO: 1913717 - DNA, 15 bp, Homo sapiens
caaagaccaagctca

SEQ ID NO: 1913718 - DNA, 15 bp, Homo sapiens
aaagaccaagctcac

SEQ ID NO: 1913719 - DNA, 15 bp, Homo sapiens
aagaccaagctcaca

SEQ ID NO: 1913720 - DNA, 15 bp, Homo sapiens
agaccaagctcacag

SEQ ID NO: 1913721 - DNA, 15 bp, Homo sapiens
gaccaagctcacagt

SEQ ID NO: 1913722 - DNA, 15 bp, Homo sapiens
accaagctcacagtc

SEQ ID NO: 1913723 - DNA, 15 bp, Homo sapiens
ccaagctcacagtcc

SEQ ID NO: 1913724 - DNA, 15 bp, Homo sapiens
caagctcacagtcct

SEQ ID NO: 1913725 - DNA, 15 bp, Homo sapiens
aagctcacagtcctc

SEQ ID NO: 1913726 - DNA, 15 bp, Homo sapiens
agctcacagtcctca

SEQ ID NO: 1913727 - DNA, 15 bp, Homo sapiens
gctcacagtcctcac

SEQ ID NO: 1913728 - DNA, 15 bp, Homo sapiens
ctcacagtcctcaca

SEQ ID NO: 1913729 - DNA, 15 bp, Homo sapiens
tcacagtcctcacag

SEQ ID NO: 1913730 - DNA, 15 bp, Homo sapiens
cacagtcctcacaga

SEQ ID NO: 1913731 - DNA, 15 bp, Homo sapiens
acagtcctcacagac

SEQ ID NO: 1913732 - DNA, 15 bp, Homo sapiens
cagtcctcacagacc

SEQ ID NO: 1913733 - DNA, 15 bp, Homo sapiens
agtcctcacagaccc

SEQ ID NO: 1913734 - DNA, 15 bp, Homo sapiens
gtcctcacagacccc

SEQ ID NO: 1913735 - DNA, 15 bp, Homo sapiens
tcctcacagacccca

SEQ ID NO: 1913736 - DNA, 15 bp, Homo sapiens
cctcacagaccccag

SEQ ID NO: 1913737 - DNA, 15 bp, Homo sapiens
ctcacagaccccagt

SEQ ID NO: 1913738 - DNA, 15 bp, Homo sapiens
tcacagaccccagtc

SEQ ID NO: 1913739 - DNA, 15 bp, Homo sapiens
acagaccccagtcca

SEQ ID NO: 1913740 - DNA, 15 bp, Homo sapiens
cagaccccagtccag

SEQ ID NO: 1913741 - DNA, 15 bp, Homo sapiens
agaccccagtccagg

SEQ ID NO: 1913742 - DNA, 15 bp, Homo sapiens
gaccccagtccagga

SEQ ID NO: 1913743 - DNA, 15 bp, Homo sapiens
accccagtccaggaa

SEQ ID NO: 1913744 - DNA, 15 bp, Homo sapiens
ccccagtccaggaac

SEQ ID NO: 1913745 - DNA, 15 bp, Homo sapiens
cccagtccaggaacc

SEQ ID NO: 1913746 - DNA, 15 bp, Homo sapiens
ccagtccaggaacct

SEQ ID NO: 1913747 - DNA, 15 bp, Homo sapiens
cagtccaggaacctg

SEQ ID NO: 1913748 - DNA, 15 bp, Homo sapiens
agtccaggaacctgg

SEQ ID NO: 1913749 - DNA, 15 bp, Homo sapiens
gtccaggaacctgga

SEQ ID NO: 1913750 - DNA, 15 bp, Homo sapiens
tccaggaacctggaa

SEQ ID NO: 1913751 - DNA, 15 bp, Homo sapiens
ccaggaacctggaac

SEQ ID NO: 1913752 - DNA, 15 bp, Homo sapiens
caggaacctggaacc

SEQ ID NO: 1913753 - DNA, 15 bp, Homo sapiens
aggaacctggaaccc

SEQ ID NO: 1913754 - DNA, 15 bp, Homo sapiens
ggaacctggaaccca

SEQ ID NO: 1913755 - DNA, 15 bp, Homo sapiens
gaacctggaacccag

SEQ ID NO: 1913756 - DNA, 15 bp, Homo sapiens
aacctggaacccaga

SEQ ID NO: 1913757 - DNA, 15 bp, Homo sapiens
acctggaacccagag

SEQ ID NO: 1913758 - DNA, 15 bp, Homo sapiens
cctggaacccagagt

SEQ ID NO: 1913759 - DNA, 15 bp, Homo sapiens
ctggaacccagagtg

SEQ ID NO: 1913760 - DNA, 15 bp, Homo sapiens
tggaacccagagtgc

SEQ ID NO: 1913761 - DNA, 15 bp, Homo sapiens
ggaacccagagtgcc

SEQ ID NO: 1913762 - DNA, 15 bp, Homo sapiens
gaacccagagtgcca

SEQ ID NO: 1913763 - DNA, 15 bp, Homo sapiens
aacccagagtgccaa

SEQ ID NO: 1913764 - DNA, 15 bp, Homo sapiens
acccagagtgccaag

SEQ ID NO: 1913765 - DNA, 15 bp, Homo sapiens
cccagagtgccaagg

SEQ ID NO: 1913766 - DNA, 15 bp, Homo sapiens
ccagagtgccaaggc

SEQ ID NO: 1913767 - DNA, 15 bp, Homo sapiens
cagagtgccaaggcc

SEQ ID NO: 1913768 - DNA, 15 bp, Homo sapiens
agagtgccaaggcca

SEQ ID NO: 1913769 - DNA, 15 bp, Homo sapiens
gagtgccaaggccat

SEQ ID NO: 1913770 - DNA, 15 bp, Homo sapiens
agtgccaaggccatg

SEQ ID NO: 1913771 - DNA, 15 bp, Homo sapiens
gtgccaaggccatgg

SEQ ID NO: 1913772 - DNA, 15 bp, Homo sapiens
tgccaaggccatggt

SEQ ID NO: 1913773 - DNA, 15 bp, Homo sapiens
gccaaggccatggtg

SEQ ID NO: 1913774 - DNA, 15 bp, Homo sapiens
ccaaggccatggtgg

SEQ ID NO: 1913775 - DNA, 15 bp, Homo sapiens
caaggccatggtgga

SEQ ID NO: 1913776 - DNA, 15 bp, Homo sapiens
aaggccatggtggaa

SEQ ID NO: 1913777 - DNA, 15 bp, Homo sapiens
aggccatggtggaag

SEQ ID NO: 1913778 - DNA, 15 bp, Homo sapiens
ggccatggtggaagg

SEQ ID NO: 1913779 - DNA, 15 bp, Homo sapiens
gccatggtggaaggc

SEQ ID NO: 1913780 - DNA, 15 bp, Homo sapiens
ccatggtggaaggca

SEQ ID NO: 1913781 - DNA, 15 bp, Homo sapiens
catggtggaaggcag

SEQ ID NO: 1913782 - DNA, 15 bp, Homo sapiens
atggtggaaggcagg

SEQ ID NO: 1913783 - DNA, 15 bp, Homo sapiens
tggtggaaggcaggc

SEQ ID NO: 1913784 - DNA, 15 bp, Homo sapiens
ggtggaaggcaggcg

SEQ ID NO: 1913785 - DNA, 15 bp, Homo sapiens
gtggaaggcaggcgc

SEQ ID NO: 1913786 - DNA, 15 bp, Homo sapiens
tggaaggcaggcgcc

SEQ ID NO: 1913787 - DNA, 15 bp, Homo sapiens
ggaaggcaggcgccc

SEQ ID NO: 1913788 - DNA, 15 bp, Homo sapiens
gaaggcaggcgccca

SEQ ID NO: 1913789 - DNA, 15 bp, Homo sapiens
aaggcaggcgcccag

SEQ ID NO: 1913790 - DNA, 15 bp, Homo sapiens
aggcaggcgcccagc

SEQ ID NO: 1913791 - DNA, 15 bp, Homo sapiens
ggcaggcgcccagca

SEQ ID NO: 1913792 - DNA, 15 bp, Homo sapiens
gcaggcgcccagcac

SEQ ID NO: 1913793 - DNA, 15 bp, Homo sapiens
caggcgcccagcacc

SEQ ID NO: 1913794 - DNA, 15 bp, Homo sapiens
aggcgcccagcaccc

SEQ ID NO: 1913795 - DNA, 15 bp, Homo sapiens
ggcgcccagcacccc

SEQ ID NO: 1913796 - DNA, 15 bp, Homo sapiens
gcgcccagcacccca

SEQ ID NO: 1913797 - DNA, 15 bp, Homo sapiens
cgcccagcaccccag

SEQ ID NO: 1913798 - DNA, 15 bp, Homo sapiens
gcccagcaccccagc

SEQ ID NO: 1913799 - DNA, 15 bp, Homo sapiens
cccagcaccccagcc

SEQ ID NO: 1913800 - DNA, 15 bp, Homo sapiens
ccagcaccccagccc

SEQ ID NO: 1913801 - DNA, 15 bp, Homo sapiens
cagcaccccagccct

SEQ ID NO: 1913802 - DNA, 15 bp, Homo sapiens
agcaccccagccctt

SEQ ID NO: 1913803 - DNA, 15 bp, Homo sapiens
gcaccccagcccttc

SEQ ID NO: 1913804 - DNA, 15 bp, Homo sapiens
caccccagcccttct

SEQ ID NO: 1913805 - DNA, 15 bp, Homo sapiens
accccagcccttctg

SEQ ID NO: 1913806 - DNA, 15 bp, Homo sapiens
ccccagcccttctgg

SEQ ID NO: 1913807 - DNA, 15 bp, Homo sapiens
cccagcccttctggc

SEQ ID NO: 1913808 - DNA, 15 bp, Homo sapiens
ccagcccttctggcc

SEQ ID NO: 1913809 - DNA, 15 bp, Homo sapiens
cagcccttctggcct

SEQ ID NO: 1913810 - DNA, 15 bp, Homo sapiens
agcccttctggcctc

SEQ ID NO: 1913811 - DNA, 15 bp, Homo sapiens
gcccttctggcctca

SEQ ID NO: 1913812 - DNA, 15 bp, Homo sapiens
cccttctggcctcac

SEQ ID NO: 1913813 - DNA, 15 bp, Homo sapiens
ccttctggcctcacc

SEQ ID NO: 1913814 - DNA, 15 bp, Homo sapiens
cttctggcctcacct

SEQ ID NO: 1913815 - DNA, 15 bp, Homo sapiens
ttctggcctcacctc

SEQ ID NO: 1913816 - DNA, 15 bp, Homo sapiens
tctggcctcacctca

SEQ ID NO: 1913817 - DNA, 15 bp, Homo sapiens
ctggcctcacctcac

SEQ ID NO: 1913818 - DNA, 15 bp, Homo sapiens
tggcctcacctcacc

SEQ ID NO: 1913819 - DNA, 15 bp, Homo sapiens
ggcctcacctcacct

SEQ ID NO: 1913820 - DNA, 15 bp, Homo sapiens
gcctcacctcacctc

SEQ ID NO: 1913821 - DNA, 15 bp, Homo sapiens
cctcacctcacctct

SEQ ID NO: 1913822 - DNA, 15 bp, Homo sapiens
ctcacctcacctctg

SEQ ID NO: 1913823 - DNA, 15 bp, Homo sapiens
tcacctcacctctgg

SEQ ID NO: 1913824 - DNA, 15 bp, Homo sapiens
cacctcacctctggg

SEQ ID NO: 1913825 - DNA, 15 bp, Homo sapiens
acctcacctctgggc

SEQ ID NO: 1913826 - DNA, 15 bp, Homo sapiens
cctcacctctgggct

SEQ ID NO: 1913827 - DNA, 15 bp, Homo sapiens
ctcacctctgggctg

SEQ ID NO: 1913828 - DNA, 15 bp, Homo sapiens
tcacctctgggctgg

SEQ ID NO: 1913829 - DNA, 15 bp, Homo sapiens
cacctctgggctggc

SEQ ID NO: 1913830 - DNA, 15 bp, Homo sapiens
acctctgggctggcc

SEQ ID NO: 1913831 - DNA, 15 bp, Homo sapiens
cctctgggctggccc

SEQ ID NO: 1913832 - DNA, 15 bp, Homo sapiens
ctctgggctggccct

SEQ ID NO: 1913833 - DNA, 15 bp, Homo sapiens
tctgggctggccctg

SEQ ID NO: 1913834 - DNA, 15 bp, Homo sapiens
ctgggctggccctgg

SEQ ID NO: 1913835 - DNA, 15 bp, Homo sapiens
tgggctggccctggg

SEQ ID NO: 1913836 - DNA, 15 bp, Homo sapiens
gggctggccctgggg

SEQ ID NO: 1913837 - DNA, 15 bp, Homo sapiens
ggctggccctggggt

SEQ ID NO: 1913838 - DNA, 15 bp, Homo sapiens
gctggccctggggtg

SEQ ID NO: 1913839 - DNA, 15 bp, Homo sapiens
ctggccctggggtga

SEQ ID NO: 1913840 - DNA, 15 bp, Homo sapiens
tggccctggggtgag

SEQ ID NO: 1913841 - DNA, 15 bp, Homo sapiens
ggccctggggtgagg

SEQ ID NO: 1913842 - DNA, 15 bp, Homo sapiens
gccctggggtgagga

SEQ ID NO: 1913843 - DNA, 15 bp, Homo sapiens
ccctggggtgaggaa

SEQ ID NO: 1913844 - DNA, 15 bp, Homo sapiens
cctggggtgaggaag

SEQ ID NO: 1913845 - DNA, 15 bp, Homo sapiens
ctggggtgaggaagg

SEQ ID NO: 1913846 - DNA, 15 bp, Homo sapiens
tggggtgaggaagga

SEQ ID NO: 1913847 - DNA, 15 bp, Homo sapiens
ggggtgaggaaggac

SEQ ID NO: 1913848 - DNA, 15 bp, Homo sapiens
gggtgaggaaggacc

SEQ ID NO: 1913849 - DNA, 15 bp, Homo sapiens
ggtgaggaaggacca

SEQ ID NO: 1913850 - DNA, 15 bp, Homo sapiens
gtgaggaaggaccac

SEQ ID NO: 1913851 - DNA, 15 bp, Homo sapiens
tgaggaaggaccact

SEQ ID NO: 1913852 - DNA, 15 bp, Homo sapiens
gaggaaggaccactc

SEQ ID NO: 1913853 - DNA, 15 bp, Homo sapiens
aggaaggaccactca

SEQ ID NO: 1913854 - DNA, 15 bp, Homo sapiens
ggaaggaccactcag

SEQ ID NO: 1913855 - DNA, 15 bp, Homo sapiens
gaaggaccactcagc

SEQ ID NO: 1913856 - DNA, 15 bp, Homo sapiens
aaggaccactcagca

SEQ ID NO: 1913857 - DNA, 15 bp, Homo sapiens
aggaccactcagcag

SEQ ID NO: 1913858 - DNA, 15 bp, Homo sapiens
ggaccactcagcagg

SEQ ID NO: 1913859 - DNA, 15 bp, Homo sapiens
gaccactcagcaggg

SEQ ID NO: 1913860 - DNA, 15 bp, Homo sapiens
accactcagcagggg

SEQ ID NO: 1913861 - DNA, 15 bp, Homo sapiens
ccactcagcaggggc

SEQ ID NO: 1913862 - DNA, 15 bp, Homo sapiens
cactcagcaggggcc

SEQ ID NO: 1913863 - DNA, 15 bp, Homo sapiens
actcagcaggggccc

SEQ ID NO: 1913864 - DNA, 15 bp, Homo sapiens
ctcagcaggggccca

SEQ ID NO: 1913865 - DNA, 15 bp, Homo sapiens
tcagcaggggcccaa

SEQ ID NO: 1913866 - DNA, 15 bp, Homo sapiens
cagcaggggcccaag

SEQ ID NO: 1913867 - DNA, 15 bp, Homo sapiens
agcaggggcccaagg

SEQ ID NO: 1913868 - DNA, 15 bp, Homo sapiens
gcaggggcccaaggg

SEQ ID NO: 1913869 - DNA, 15 bp, Homo sapiens
caggggcccaagggg

SEQ ID NO: 1913870 - DNA, 15 bp, Homo sapiens
aggggcccaaggggt

SEQ ID NO: 1913871 - DNA, 15 bp, Homo sapiens
ggggcccaaggggtg

SEQ ID NO: 1913872 - DNA, 15 bp, Homo sapiens
gggcccaaggggtgg

SEQ ID NO: 1913873 - DNA, 15 bp, Homo sapiens
ggcccaaggggtggg

SEQ ID NO: 1913874 - DNA, 15 bp, Homo sapiens
gcccaaggggtgggg

SEQ ID NO: 1913875 - DNA, 15 bp, Homo sapiens
cccaaggggtggggc

SEQ ID NO: 1913876 - DNA, 15 bp, Homo sapiens
ccaaggggtggggct

SEQ ID NO: 1913877 - DNA, 15 bp, Homo sapiens
caaggggtggggctg

SEQ ID NO: 1913878 - DNA, 15 bp, Homo sapiens
aaggggtggggctga

SEQ ID NO: 1913879 - DNA, 15 bp, Homo sapiens
aggggtggggctgac

SEQ ID NO: 1913880 - DNA, 15 bp, Homo sapiens
ggggtggggctgacc

SEQ ID NO: 1913881 - DNA, 15 bp, Homo sapiens
gggtggggctgaccc

SEQ ID NO: 1913882 - DNA, 15 bp, Homo sapiens
ggtggggctgacccc

SEQ ID NO: 1913883 - DNA, 15 bp, Homo sapiens
gtggggctgacccca

SEQ ID NO: 1913884 - DNA, 15 bp, Homo sapiens
tggggctgaccccag

SEQ ID NO: 1913885 - DNA, 15 bp, Homo sapiens
ggggctgaccccagg

SEQ ID NO: 1913886 - DNA, 15 bp, Homo sapiens
gggctgaccccaggt

SEQ ID NO: 1913887 - DNA, 15 bp, Homo sapiens
ggctgaccccaggtg

SEQ ID NO: 1913888 - DNA, 15 bp, Homo sapiens
gctgaccccaggtga

SEQ ID NO: 1913889 - DNA, 15 bp, Homo sapiens
ctgaccccaggtgag

SEQ ID NO: 1913890 - DNA, 15 bp, Homo sapiens
tgaccccaggtgagt

SEQ ID NO: 1913891 - DNA, 15 bp, Homo sapiens
gaccccaggtgagtc

SEQ ID NO: 1913892 - DNA, 15 bp, Homo sapiens
accccaggtgagtcc

SEQ ID NO: 1913893 - DNA, 15 bp, Homo sapiens
ccccaggtgagtcct

SEQ ID NO: 1913894 - DNA, 15 bp, Homo sapiens
cccaggtgagtccta

SEQ ID NO: 1913895 - DNA, 15 bp, Homo sapiens
ccaggtgagtcctag

SEQ ID NO: 1913896 - DNA, 15 bp, Homo sapiens
caggtgagtcctagg

SEQ ID NO: 1913897 - DNA, 15 bp, Homo sapiens
aggtgagtcctaggg

SEQ ID NO: 1913898 - DNA, 15 bp, Homo sapiens
ggtgagtcctagggc

SEQ ID NO: 1913899 - DNA, 15 bp, Homo sapiens
gtgagtcctagggcc

SEQ ID NO: 1913900 - DNA, 15 bp, Homo sapiens
tgagtcctagggcct

SEQ ID NO: 1913901 - DNA, 15 bp, Homo sapiens
gagtcctagggcctg

SEQ ID NO: 1913902 - DNA, 15 bp, Homo sapiens
agtcctagggcctgg

SEQ ID NO: 1913903 - DNA, 15 bp, Homo sapiens
gtcctagggcctggg

SEQ ID NO: 1913904 - DNA, 15 bp, Homo sapiens
tcctagggcctgggg

SEQ ID NO: 1913905 - DNA, 15 bp, Homo sapiens
cctagggcctggggg

SEQ ID NO: 1913906 - DNA, 15 bp, Homo sapiens
ctagggcctgggggt

SEQ ID NO: 1913907 - DNA, 15 bp, Homo sapiens
tagggcctgggggtg

SEQ ID NO: 1913908 - DNA, 15 bp, Homo sapiens
agggcctgggggtgc

SEQ ID NO: 1913909 - DNA, 15 bp, Homo sapiens
gggcctgggggtgct

SEQ ID NO: 1913910 - DNA, 15 bp, Homo sapiens
ggcctgggggtgctg

SEQ ID NO: 1913911 - DNA, 15 bp, Homo sapiens
gcctgggggtgctgg

SEQ ID NO: 1913912 - DNA, 15 bp, Homo sapiens
cctgggggtgctggg

SEQ ID NO: 1913913 - DNA, 15 bp, Homo sapiens
ctgggggtgctgggg

SEQ ID NO: 1913914 - DNA, 15 bp, Homo sapiens
tgggggtgctggggt

SEQ ID NO: 1913915 - DNA, 15 bp, Homo sapiens
gggggtgctggggta

SEQ ID NO: 1913916 - DNA, 15 bp, Homo sapiens
ggggtgctggggtag

SEQ ID NO: 1913917 - DNA, 15 bp, Homo sapiens
gggtgctggggtagg

SEQ ID NO: 1913918 - DNA, 15 bp, Homo sapiens
ggtgctggggtaggg

SEQ ID NO: 1913919 - DNA, 15 bp, Homo sapiens
gtgctggggtagggc

SEQ ID NO: 1913920 - DNA, 15 bp, Homo sapiens
tgctggggtagggct

SEQ ID NO: 1913921 - DNA, 15 bp, Homo sapiens
gctggggtagggctc

SEQ ID NO: 1913922 - DNA, 15 bp, Homo sapiens
ctggggtagggctcc

SEQ ID NO: 1913923 - DNA, 15 bp, Homo sapiens
tggggtagggctccc

SEQ ID NO: 1913924 - DNA, 15 bp, Homo sapiens
ggggtagggctccca

SEQ ID NO: 1913925 - DNA, 15 bp, Homo sapiens
gggtagggctcccac

SEQ ID NO: 1913926 - DNA, 15 bp, Homo sapiens
ggtagggctcccacg

SEQ ID NO: 1913927 - DNA, 15 bp, Homo sapiens
gtagggctcccacgg

SEQ ID NO: 1913928 - DNA, 15 bp, Homo sapiens
tagggctcccacggg

SEQ ID NO: 1913929 - DNA, 15 bp, Homo sapiens
agggctcccacgggg

SEQ ID NO: 1913930 - DNA, 15 bp, Homo sapiens
gggctcccacgggga

SEQ ID NO: 1913931 - DNA, 15 bp, Homo sapiens
ggctcccacggggac

SEQ ID NO: 1913932 - DNA, 15 bp, Homo sapiens
gctcccacggggact

SEQ ID NO: 1913933 - DNA, 15 bp, Homo sapiens
ctcccacggggactc

SEQ ID NO: 1913934 - DNA, 15 bp, Homo sapiens
tcccacggggactca

SEQ ID NO: 1913935 - DNA, 15 bp, Homo sapiens
cccacggggactcac

SEQ ID NO: 1913936 - DNA, 15 bp, Homo sapiens
ccacggggactcacc

SEQ ID NO: 1913937 - DNA, 15 bp, Homo sapiens
cacggggactcaccg

SEQ ID NO: 1913938 - DNA, 15 bp, Homo sapiens
acggggactcaccgg

SEQ ID NO: 1913939 - DNA, 15 bp, Homo sapiens
cggggactcaccggc

SEQ ID NO: 1913940 - DNA, 15 bp, Homo sapiens
ggggactcaccggct

SEQ ID NO: 1913941 - DNA, 15 bp, Homo sapiens
gggactcaccggctc

SEQ ID NO: 1913942 - DNA, 15 bp, Homo sapiens
ggactcaccggctca

SEQ ID NO: 1913943 - DNA, 15 bp, Homo sapiens
gactcaccggctcag

SEQ ID NO: 1913944 - DNA, 15 bp, Homo sapiens
actcaccggctcagc

SEQ ID NO: 1913945 - DNA, 15 bp, Homo sapiens
ctcaccggctcagca

SEQ ID NO: 1913946 - DNA, 15 bp, Homo sapiens
tcaccggctcagcaa

SEQ ID NO: 1913947 - DNA, 15 bp, Homo sapiens
caccggctcagcaaa

SEQ ID NO: 1913948 - DNA, 15 bp, Homo sapiens
accggctcagcaaag

SEQ ID NO: 1913949 - DNA, 15 bp, Homo sapiens
ccggctcagcaaagg

SEQ ID NO: 1913950 - DNA, 15 bp, Homo sapiens
cggctcagcaaaggc

SEQ ID NO: 1913951 - DNA, 15 bp, Homo sapiens
ggctcagcaaaggca

SEQ ID NO: 1913952 - DNA, 15 bp, Homo sapiens
gctcagcaaaggcat

SEQ ID NO: 1913953 - DNA, 15 bp, Homo sapiens
ctcagcaaaggcatt

SEQ ID NO: 1913954 - DNA, 15 bp, Homo sapiens
tcagcaaaggcattg

SEQ ID NO: 1913955 - DNA, 15 bp, Homo sapiens
cagcaaaggcattgt

SEQ ID NO: 1913956 - DNA, 15 bp, Homo sapiens
agcaaaggcattgtc

SEQ ID NO: 1913957 - DNA, 15 bp, Homo sapiens
gcaaaggcattgtcc

SEQ ID NO: 1913958 - DNA, 15 bp, Homo sapiens
caaaggcattgtccc

SEQ ID NO: 1913959 - DNA, 15 bp, Homo sapiens
aaaggcattgtccca

SEQ ID NO: 1913960 - DNA, 15 bp, Homo sapiens
aaggcattgtcccac

SEQ ID NO: 1913961 - DNA, 15 bp, Homo sapiens
aggcattgtcccaca

SEQ ID NO: 1913962 - DNA, 15 bp, Homo sapiens
ggcattgtcccacag

SEQ ID NO: 1913963 - DNA, 15 bp, Homo sapiens
gcattgtcccacagc

SEQ ID NO: 1913964 - DNA, 15 bp, Homo sapiens
cattgtcccacagca

SEQ ID NO: 1913965 - DNA, 15 bp, Homo sapiens
attgtcccacagcac

SEQ ID NO: 1913966 - DNA, 15 bp, Homo sapiens
ttgtcccacagcaca

SEQ ID NO: 1913967 - DNA, 15 bp, Homo sapiens
tgtcccacagcacag

SEQ ID NO: 1913968 - DNA, 15 bp, Homo sapiens
gtcccacagcacagt

SEQ ID NO: 1913969 - DNA, 15 bp, Homo sapiens
tcccacagcacagta

SEQ ID NO: 1913970 - DNA, 15 bp, Homo sapiens
cccacagcacagtag

SEQ ID NO: 1913971 - DNA, 15 bp, Homo sapiens
ccacagcacagtagc

SEQ ID NO: 1913972 - DNA, 15 bp, Homo sapiens
cacagcacagtagcc

SEQ ID NO: 1913973 - DNA, 15 bp, Homo sapiens
acagcacagtagccg

SEQ ID NO: 1913974 - DNA, 15 bp, Homo sapiens
cagcacagtagccgt

SEQ ID NO: 1913975 - DNA, 15 bp, Homo sapiens
agcacagtagccgtg

SEQ ID NO: 1913976 - DNA, 15 bp, Homo sapiens
gcacagtagccgtgg

SEQ ID NO: 1913977 - DNA, 15 bp, Homo sapiens
cacagtagccgtggc

SEQ ID NO: 1913978 - DNA, 15 bp, Homo sapiens
acagtagccgtggca

SEQ ID NO: 1913979 - DNA, 15 bp, Homo sapiens
cagtagccgtggcat

SEQ ID NO: 1913980 - DNA, 15 bp, Homo sapiens
agtagccgtggcatt

SEQ ID NO: 1913981 - DNA, 15 bp, Homo sapiens
gtagccgtggcattg

SEQ ID NO: 1913982 - DNA, 15 bp, Homo sapiens
tagccgtggcattgt

SEQ ID NO: 1913983 - DNA, 15 bp, Homo sapiens
agccgtggcattgtg

SEQ ID NO: 1913984 - DNA, 15 bp, Homo sapiens
gccgtggcattgtgg

SEQ ID NO: 1913985 - DNA, 15 bp, Homo sapiens
ccgtggcattgtggt

SEQ ID NO: 1913986 - DNA, 15 bp, Homo sapiens
cgtggcattgtggtc

SEQ ID NO: 1913987 - DNA, 15 bp, Homo sapiens
gtggcattgtggtcc

SEQ ID NO: 1913988 - DNA, 15 bp, Homo sapiens
tggcattgtggtcct

SEQ ID NO: 1913989 - DNA, 15 bp, Homo sapiens
ggcattgtggtcctg

SEQ ID NO: 1913990 - DNA, 15 bp, Homo sapiens
gcattgtggtcctgg

SEQ ID NO: 1913991 - DNA, 15 bp, Homo sapiens
cattgtggtcctggc

SEQ ID NO: 1913992 - DNA, 15 bp, Homo sapiens
attgtggtcctggct

SEQ ID NO: 1913993 - DNA, 15 bp, Homo sapiens
ttgtggtcctggctg

SEQ ID NO: 1913994 - DNA, 15 bp, Homo sapiens
tgtggtcctggctgc

SEQ ID NO: 1913995 - DNA, 15 bp, Homo sapiens
gtggtcctggctgcc

SEQ ID NO: 1913996 - DNA, 15 bp, Homo sapiens
tggtcctggctgccg

SEQ ID NO: 1913997 - DNA, 15 bp, Homo sapiens
ggtcctggctgccgt

SEQ ID NO: 1913998 - DNA, 15 bp, Homo sapiens
gtcctggctgccgtg

SEQ ID NO: 1913999 - DNA, 15 bp, Homo sapiens
tcctggctgccgtgg

SEQ ID NO: 1914000 - DNA, 15 bp, Homo sapiens
cctggctgccgtgga

SEQ ID NO: 1914001 - DNA, 15 bp, Homo sapiens
ctggctgccgtggac

SEQ ID NO: 1914002 - DNA, 15 bp, Homo sapiens
tggctgccgtggacg

SEQ ID NO: 1914003 - DNA, 15 bp, Homo sapiens
ggctgccgtggacga

SEQ ID NO: 1914004 - DNA, 15 bp, Homo sapiens
gctgccgtggacgat

SEQ ID NO: 1914005 - DNA, 15 bp, Homo sapiens
ctgccgtggacgatg

SEQ ID NO: 1914006 - DNA, 15 bp, Homo sapiens
tgccgtggacgatga

SEQ ID NO: 1914007 - DNA, 15 bp, Homo sapiens
gccgtggacgatgac

SEQ ID NO: 1914008 - DNA, 15 bp, Homo sapiens
ccgtggacgatgaca

SEQ ID NO: 1914009 - DNA, 15 bp, Homo sapiens
cgtggacgatgacaa

SEQ ID NO: 1914010 - DNA, 15 bp, Homo sapiens
gtggacgatgacaac

SEQ ID NO: 1914011 - DNA, 15 bp, Homo sapiens
tggacgatgacaacc

SEQ ID NO: 1914012 - DNA, 15 bp, Homo sapiens
ggacgatgacaacca

SEQ ID NO: 1914013 - DNA, 15 bp, Homo sapiens
gacgatgacaaccac

SEQ ID NO: 1914014 - DNA, 15 bp, Homo sapiens
acgatgacaaccaca

SEQ ID NO: 1914015 - DNA, 15 bp, Homo sapiens
cgatgacaaccacag

SEQ ID NO: 1914016 - DNA, 15 bp, Homo sapiens
gatgacaaccacagg

SEQ ID NO: 1914017 - DNA, 15 bp, Homo sapiens
atgacaaccacaggt

SEQ ID NO: 1914018 - DNA, 15 bp, Homo sapiens
tgacaaccacaggta

SEQ ID NO: 1914019 - DNA, 15 bp, Homo sapiens
gacaaccacaggtag

SEQ ID NO: 1914020 - DNA, 15 bp, Homo sapiens
acaaccacaggtagg

SEQ ID NO: 1914021 - DNA, 15 bp, Homo sapiens
caaccacaggtaggg

SEQ ID NO: 1914022 - DNA, 15 bp, Homo sapiens
aaccacaggtaggga

SEQ ID NO: 1914023 - DNA, 15 bp, Homo sapiens
accacaggtagggac

SEQ ID NO: 1914024 - DNA, 15 bp, Homo sapiens
ccacaggtagggaca

SEQ ID NO: 1914025 - DNA, 15 bp, Homo sapiens
cacaggtagggacag

SEQ ID NO: 1914026 - DNA, 15 bp, Homo sapiens
acaggtagggacaga

SEQ ID NO: 1914027 - DNA, 15 bp, Homo sapiens
caggtagggacagag

SEQ ID NO: 1914028 - DNA, 15 bp, Homo sapiens
aggtagggacagagt

SEQ ID NO: 1914029 - DNA, 15 bp, Homo sapiens
ggtagggacagagtc

SEQ ID NO: 1914030 - DNA, 15 bp, Homo sapiens
gtagggacagagtct

SEQ ID NO: 1914031 - DNA, 15 bp, Homo sapiens
tagggacagagtcta

SEQ ID NO: 1914032 - DNA, 15 bp, Homo sapiens
agggacagagtctac

SEQ ID NO: 1914033 - DNA, 15 bp, Homo sapiens
gggacagagtctaca

SEQ ID NO: 1914034 - DNA, 15 bp, Homo sapiens
ggacagagtctacag

SEQ ID NO: 1914035 - DNA, 15 bp, Homo sapiens
gacagagtctacagg

SEQ ID NO: 1914036 - DNA, 15 bp, Homo sapiens
acagagtctacagga

SEQ ID NO: 1914037 - DNA, 15 bp, Homo sapiens
cagagtctacaggag

SEQ ID NO: 1914038 - DNA, 15 bp, Homo sapiens
agagtctacaggagt

SEQ ID NO: 1914039 - DNA, 15 bp, Homo sapiens
gagtctacaggagtc

SEQ ID NO: 1914040 - DNA, 15 bp, Homo sapiens
agtctacaggagtca

SEQ ID NO: 1914041 - DNA, 15 bp, Homo sapiens
gtctacaggagtcaa

SEQ ID NO: 1914042 - DNA, 15 bp, Homo sapiens
tctacaggagtcaaa

SEQ ID NO: 1914043 - DNA, 15 bp, Homo sapiens
ctacaggagtcaaag

SEQ ID NO: 1914044 - DNA, 15 bp, Homo sapiens
tacaggagtcaaagg

SEQ ID NO: 1914045 - DNA, 15 bp, Homo sapiens
acaggagtcaaagga

SEQ ID NO: 1914046 - DNA, 15 bp, Homo sapiens
caggagtcaaaggaa

SEQ ID NO: 1914047 - DNA, 15 bp, Homo sapiens
aggagtcaaaggaac

SEQ ID NO: 1914048 - DNA, 15 bp, Homo sapiens
ggagtcaaaggaacc

SEQ ID NO: 1914049 - DNA, 15 bp, Homo sapiens
gagtcaaaggaaccc

SEQ ID NO: 1914050 - DNA, 15 bp, Homo sapiens
agtcaaaggaaccca

SEQ ID NO: 1914051 - DNA, 15 bp, Homo sapiens
gtcaaaggaacccaa

SEQ ID NO: 1914052 - DNA, 15 bp, Homo sapiens
tcaaaggaacccaag

SEQ ID NO: 1914053 - DNA, 15 bp, Homo sapiens
caaaggaacccaagt

SEQ ID NO: 1914054 - DNA, 15 bp, Homo sapiens
aaaggaacccaagtt

SEQ ID NO: 1914055 - DNA, 15 bp, Homo sapiens
aaggaacccaagttg

SEQ ID NO: 1914056 - DNA, 15 bp, Homo sapiens
aggaacccaagttga

SEQ ID NO: 1914057 - DNA, 15 bp, Homo sapiens
ggaacccaagttgat

SEQ ID NO: 1914058 - DNA, 15 bp, Homo sapiens
gaacccaagttgatg

SEQ ID NO: 1914059 - DNA, 15 bp, Homo sapiens
aacccaagttgatgg

SEQ ID NO: 1914060 - DNA, 15 bp, Homo sapiens
acccaagttgatggg

SEQ ID NO: 1914061 - DNA, 15 bp, Homo sapiens
cccaagttgatgggg

SEQ ID NO: 1914062 - DNA, 15 bp, Homo sapiens
ccaagttgatggggc

SEQ ID NO: 1914063 - DNA, 15 bp, Homo sapiens
caagttgatggggcg

SEQ ID NO: 1914064 - DNA, 15 bp, Homo sapiens
aagttgatggggcgt

SEQ ID NO: 1914065 - DNA, 15 bp, Homo sapiens
agttgatggggcgtg

SEQ ID NO: 1914066 - DNA, 15 bp, Homo sapiens
gttgatggggcgtga

SEQ ID NO: 1914067 - DNA, 15 bp, Homo sapiens
ttgatggggcgtgac

SEQ ID NO: 1914068 - DNA, 15 bp, Homo sapiens
tgatggggcgtgacc

SEQ ID NO: 1914069 - DNA, 15 bp, Homo sapiens
gatggggcgtgacca

SEQ ID NO: 1914070 - DNA, 15 bp, Homo sapiens
atggggcgtgaccac

SEQ ID NO: 1914071 - DNA, 15 bp, Homo sapiens
tggggcgtgaccacc

SEQ ID NO: 1914072 - DNA, 15 bp, Homo sapiens
ggggcgtgaccacca

SEQ ID NO: 1914073 - DNA, 15 bp, Homo sapiens
gggcgtgaccaccac

SEQ ID NO: 1914074 - DNA, 15 bp, Homo sapiens
ggcgtgaccaccacg

SEQ ID NO: 1914075 - DNA, 15 bp, Homo sapiens
gcgtgaccaccacgt

SEQ ID NO: 1914076 - DNA, 15 bp, Homo sapiens
cgtgaccaccacgtg

SEQ ID NO: 1914077 - DNA, 15 bp, Homo sapiens
gtgaccaccacgtgc

SEQ ID NO: 1914078 - DNA, 15 bp, Homo sapiens
tgaccaccacgtgcc

SEQ ID NO: 1914079 - DNA, 15 bp, Homo sapiens
gaccaccacgtgccc

SEQ ID NO: 1914080 - DNA, 15 bp, Homo sapiens
accaccacgtgccct

SEQ ID NO: 1914081 - DNA, 15 bp, Homo sapiens
ccaccacgtgccctc

SEQ ID NO: 1914082 - DNA, 15 bp, Homo sapiens
caccacgtgccctct

SEQ ID NO: 1914083 - DNA, 15 bp, Homo sapiens
accacgtgccctctg

SEQ ID NO: 1914084 - DNA, 15 bp, Homo sapiens
ccacgtgccctctgc

SEQ ID NO: 1914085 - DNA, 15 bp, Homo sapiens
cacgtgccctctgct

SEQ ID NO: 1914086 - DNA, 15 bp, Homo sapiens
acgtgccctctgctt

SEQ ID NO: 1914087 - DNA, 15 bp, Homo sapiens
cgtgccctctgctta

SEQ ID NO: 1914088 - DNA, 15 bp, Homo sapiens
gtgccctctgcttag

SEQ ID NO: 1914089 - DNA, 15 bp, Homo sapiens
tgccctctgcttagg

SEQ ID NO: 1914090 - DNA, 15 bp, Homo sapiens
gccctctgcttaggc

SEQ ID NO: 1914091 - DNA, 15 bp, Homo sapiens
ccctctgcttaggca

SEQ ID NO: 1914092 - DNA, 15 bp, Homo sapiens
cctctgcttaggcaa

SEQ ID NO: 1914093 - DNA, 15 bp, Homo sapiens
ctctgcttaggcaac

SEQ ID NO: 1914094 - DNA, 15 bp, Homo sapiens
tctgcttaggcaaca

SEQ ID NO: 1914095 - DNA, 15 bp, Homo sapiens
ctgcttaggcaacat

SEQ ID NO: 1914096 - DNA, 15 bp, Homo sapiens
tgcttaggcaacatg

SEQ ID NO: 1914097 - DNA, 15 bp, Homo sapiens
gcttaggcaacatgc

SEQ ID NO: 1914098 - DNA, 15 bp, Homo sapiens
cttaggcaacatgcc

SEQ ID NO: 1914099 - DNA, 15 bp, Homo sapiens
ttaggcaacatgccc

SEQ ID NO: 1914100 - DNA, 15 bp, Homo sapiens
taggcaacatgccca

SEQ ID NO: 1914101 - DNA, 15 bp, Homo sapiens
aggcaacatgcccaa

SEQ ID NO: 1914102 - DNA, 15 bp, Homo sapiens
ggcaacatgcccaat

SEQ ID NO: 1914103 - DNA, 15 bp, Homo sapiens
gcaacatgcccaatc

SEQ ID NO: 1914104 - DNA, 15 bp, Homo sapiens
caacatgcccaatct

SEQ ID NO: 1914105 - DNA, 15 bp, Homo sapiens
aacatgcccaatctg

SEQ ID NO: 1914106 - DNA, 15 bp, Homo sapiens
acatgcccaatctgc

SEQ ID NO: 1914107 - DNA, 15 bp, Homo sapiens
catgcccaatctgct

SEQ ID NO: 1914108 - DNA, 15 bp, Homo sapiens
atgcccaatctgctt

SEQ ID NO: 1914109 - DNA, 15 bp, Homo sapiens
tgcccaatctgcttt

SEQ ID NO: 1914110 - DNA, 15 bp, Homo sapiens
gcccaatctgcttta

SEQ ID NO: 1914111 - DNA, 15 bp, Homo sapiens
cccaatctgctttat

SEQ ID NO: 1914112 - DNA, 15 bp, Homo sapiens
ccaatctgctttatt

SEQ ID NO: 1914113 - DNA, 15 bp, Homo sapiens
caatctgctttattt

SEQ ID NO: 1914114 - DNA, 15 bp, Homo sapiens
aatctgctttatttt

SEQ ID NO: 1914115 - DNA, 15 bp, Homo sapiens
atctgctttattttt

SEQ ID NO: 1914116 - DNA, 15 bp, Homo sapiens
tctgctttatttttt

SEQ ID NO: 1914117 - DNA, 15 bp, Homo sapiens
ctgctttattttttt

SEQ ID NO: 1914118 - DNA, 15 bp, Homo sapiens
tgctttatttttttt

SEQ ID NO: 1914119 - DNA, 15 bp, Homo sapiens
gctttattttttttt

SEQ ID NO: 1914120 - DNA, 15 bp, Homo sapiens
ctttattttttttta

SEQ ID NO: 1914121 - DNA, 15 bp, Homo sapiens
tttatttttttttat

SEQ ID NO: 1914122 - DNA, 15 bp, Homo sapiens
ttatttttttttatg

SEQ ID NO: 1914123 - DNA, 15 bp, Homo sapiens
tatttttttttatgt

SEQ ID NO: 1914124 - DNA, 15 bp, Homo sapiens
atttttttttatgta

SEQ ID NO: 1914125 - DNA, 15 bp, Homo sapiens
tttttttttatgtat

SEQ ID NO: 1914126 - DNA, 15 bp, Homo sapiens
ttttttttatgtatt

SEQ ID NO: 1914127 - DNA, 15 bp, Homo sapiens
tttttttatgtattt

SEQ ID NO: 1914128 - DNA, 15 bp, Homo sapiens
ttttttatgtatttt

SEQ ID NO: 1914129 - DNA, 15 bp, Homo sapiens
tttttatgtattttt

SEQ ID NO: 1914130 - DNA, 15 bp, Homo sapiens
ttttatgtatttttt

SEQ ID NO: 1914131 - DNA, 15 bp, Homo sapiens
tttatgtattttttt

SEQ ID NO: 1914132 - DNA, 15 bp, Homo sapiens
ttatgtatttttttt

SEQ ID NO: 1914133 - DNA, 15 bp, Homo sapiens
tatgtattttttttt

SEQ ID NO: 1914134 - DNA, 15 bp, Homo sapiens
gtatttttttttttg

SEQ ID NO: 1914135 - DNA, 15 bp, Homo sapiens
atttttttttttgat

SEQ ID NO: 1914136 - DNA, 15 bp, Homo sapiens
ttttttttgatatgg

SEQ ID NO: 1914137 - DNA, 15 bp, Homo sapiens
tttttttgatatgga

SEQ ID NO: 1914138 - DNA, 15 bp, Homo sapiens
ttttttgatatggag

SEQ ID NO: 1914139 - DNA, 15 bp, Homo sapiens
tttttgatatggagt

SEQ ID NO: 1914140 - DNA, 15 bp, Homo sapiens
ttttgatatggagtt

SEQ ID NO: 1914141 - DNA, 15 bp, Homo sapiens
tttgatatggagttt

SEQ ID NO: 1914142 - DNA, 15 bp, Homo sapiens
ttgatatggagtttc

SEQ ID NO: 1914143 - DNA, 15 bp, Homo sapiens
tgatatggagtttca

SEQ ID NO: 1914144 - DNA, 15 bp, Homo sapiens
gatatggagtttcac

SEQ ID NO: 1914145 - DNA, 15 bp, Homo sapiens
atatggagtttcact

SEQ ID NO: 1914146 - DNA, 15 bp, Homo sapiens
tatggagtttcactc

SEQ ID NO: 1914147 - DNA, 15 bp, Homo sapiens
aatctcggctcacca

SEQ ID NO: 1914148 - DNA, 15 bp, Homo sapiens
attacaggcatgtgt

SEQ ID NO: 1914149 - DNA, 15 bp, Homo sapiens
ttacaggcatgtgtc

SEQ ID NO: 1914150 - DNA, 15 bp, Homo sapiens
tgtgtcaccacacct

SEQ ID NO: 1914151 - DNA, 15 bp, Homo sapiens
gtgtcaccacacctg

SEQ ID NO: 1914152 - DNA, 15 bp, Homo sapiens
tgtcaccacacctgg

SEQ ID NO: 1914153 - DNA, 15 bp, Homo sapiens
gtcaccacacctggc

SEQ ID NO: 1914154 - DNA, 15 bp, Homo sapiens
tcaccacacctggct

SEQ ID NO: 1914155 - DNA, 15 bp, Homo sapiens
tgttggtcaggttga

SEQ ID NO: 1914156 - DNA, 15 bp, Homo sapiens
gttggtcaggttgat

SEQ ID NO: 1914157 - DNA, 15 bp, Homo sapiens
ttggtcaggttgatc

SEQ ID NO: 1914158 - DNA, 15 bp, Homo sapiens
tggtcaggttgatct

SEQ ID NO: 1914159 - DNA, 15 bp, Homo sapiens
ggtcaggttgatctc

SEQ ID NO: 1914160 - DNA, 15 bp, Homo sapiens
gtcaggttgatctcg

SEQ ID NO: 1914161 - DNA, 15 bp, Homo sapiens
tcaggttgatctcga

SEQ ID NO: 1914162 - DNA, 15 bp, Homo sapiens
caggttgatctcgaa

SEQ ID NO: 1914163 - DNA, 15 bp, Homo sapiens
aggttgatctcgaac

SEQ ID NO: 1914164 - DNA, 15 bp, Homo sapiens
ggttgatctcgaacc

SEQ ID NO: 1914165 - DNA, 15 bp, Homo sapiens
gttgatctcgaaccc

SEQ ID NO: 1914166 - DNA, 15 bp, Homo sapiens
ttgatctcgaacccc

SEQ ID NO: 1914167 - DNA, 15 bp, Homo sapiens
tgatctcgaacccct

SEQ ID NO: 1914168 - DNA, 15 bp, Homo sapiens
gatctcgaacccctg

SEQ ID NO: 1914169 - DNA, 15 bp, Homo sapiens
atctcgaacccctga

SEQ ID NO: 1914170 - DNA, 15 bp, Homo sapiens
aacccctgacctcag

SEQ ID NO: 1914171 - DNA, 15 bp, Homo sapiens
acccctgacctcagg

SEQ ID NO: 1914172 - DNA, 15 bp, Homo sapiens
cccctgacctcaggt

SEQ ID NO: 1914173 - DNA, 15 bp, Homo sapiens
ccctgacctcaggtg

SEQ ID NO: 1914174 - DNA, 15 bp, Homo sapiens
tgatccaccctcctt

SEQ ID NO: 1914175 - DNA, 15 bp, Homo sapiens
gatccaccctccttg

SEQ ID NO: 1914176 - DNA, 15 bp, Homo sapiens
atccaccctccttgg

SEQ ID NO: 1914177 - DNA, 15 bp, Homo sapiens
tccaccctccttggc

SEQ ID NO: 1914178 - DNA, 15 bp, Homo sapiens
ccaccctccttggcc

SEQ ID NO: 1914179 - DNA, 15 bp, Homo sapiens
caccctccttggcct

SEQ ID NO: 1914180 - DNA, 15 bp, Homo sapiens
accctccttggcctc

SEQ ID NO: 1914181 - DNA, 15 bp, Homo sapiens
ccctccttggcctcc

SEQ ID NO: 1914182 - DNA, 15 bp, Homo sapiens
cctccttggcctccc

SEQ ID NO: 1914183 - DNA, 15 bp, Homo sapiens
ctccttggcctccca

SEQ ID NO: 1914184 - DNA, 15 bp, Homo sapiens
tccttggcctcccaa

SEQ ID NO: 1914185 - DNA, 15 bp, Homo sapiens
gattacaggcaagac

SEQ ID NO: 1914186 - DNA, 15 bp, Homo sapiens
attacaggcaagacc

SEQ ID NO: 1914187 - DNA, 15 bp, Homo sapiens
ttacaggcaagaccc

SEQ ID NO: 1914188 - DNA, 15 bp, Homo sapiens
tacaggcaagaccca

SEQ ID NO: 1914189 - DNA, 15 bp, Homo sapiens
acaggcaagacccac

SEQ ID NO: 1914190 - DNA, 15 bp, Homo sapiens
caggcaagacccacc

SEQ ID NO: 1914191 - DNA, 15 bp, Homo sapiens
aggcaagacccacca

SEQ ID NO: 1914192 - DNA, 15 bp, Homo sapiens
ggcaagacccaccac

SEQ ID NO: 1914193 - DNA, 15 bp, Homo sapiens
gcaagacccaccacc

SEQ ID NO: 1914194 - DNA, 15 bp, Homo sapiens
caagacccaccaccc

SEQ ID NO: 1914195 - DNA, 15 bp, Homo sapiens
aagacccaccaccca

SEQ ID NO: 1914196 - DNA, 15 bp, Homo sapiens
agacccaccacccat

SEQ ID NO: 1914197 - DNA, 15 bp, Homo sapiens
gacccaccacccatg

SEQ ID NO: 1914198 - DNA, 15 bp, Homo sapiens
acccaccacccatgg

SEQ ID NO: 1914199 - DNA, 15 bp, Homo sapiens
cccaccacccatggc

SEQ ID NO: 1914200 - DNA, 15 bp, Homo sapiens
ccaccacccatggcc

SEQ ID NO: 1914201 - DNA, 15 bp, Homo sapiens
caccacccatggccg

SEQ ID NO: 1914202 - DNA, 15 bp, Homo sapiens
accacccatggccgc

SEQ ID NO: 1914203 - DNA, 15 bp, Homo sapiens
ccacccatggccgca

SEQ ID NO: 1914204 - DNA, 15 bp, Homo sapiens
cacccatggccgcaa

SEQ ID NO: 1914205 - DNA, 15 bp, Homo sapiens
acccatggccgcaat

SEQ ID NO: 1914206 - DNA, 15 bp, Homo sapiens
cccatggccgcaatc

SEQ ID NO: 1914207 - DNA, 15 bp, Homo sapiens
ccatggccgcaatct

SEQ ID NO: 1914208 - DNA, 15 bp, Homo sapiens
catggccgcaatctg

SEQ ID NO: 1914209 - DNA, 15 bp, Homo sapiens
atggccgcaatctgc

SEQ ID NO: 1914210 - DNA, 15 bp, Homo sapiens
tggccgcaatctgct

SEQ ID NO: 1914211 - DNA, 15 bp, Homo sapiens
ggccgcaatctgctt

SEQ ID NO: 1914212 - DNA, 15 bp, Homo sapiens
gccgcaatctgcttt

SEQ ID NO: 1914213 - DNA, 15 bp, Homo sapiens
ccgcaatctgcttta

SEQ ID NO: 1914214 - DNA, 15 bp, Homo sapiens
cgcaatctgctttat

SEQ ID NO: 1914215 - DNA, 15 bp, Homo sapiens
gcaatctgctttatt

SEQ ID NO: 1914216 - DNA, 15 bp, Homo sapiens
atctgctttattttc

SEQ ID NO: 1914217 - DNA, 15 bp, Homo sapiens
tctgctttattttct

SEQ ID NO: 1914218 - DNA, 15 bp, Homo sapiens
ctgctttattttctt

SEQ ID NO: 1914219 - DNA, 15 bp, Homo sapiens
tgctttattttcttc

SEQ ID NO: 1914220 - DNA, 15 bp, Homo sapiens
gctttattttcttcg

SEQ ID NO: 1914221 - DNA, 15 bp, Homo sapiens
ctttattttcttcga

SEQ ID NO: 1914222 - DNA, 15 bp, Homo sapiens
tttattttcttcgag

SEQ ID NO: 1914223 - DNA, 15 bp, Homo sapiens
ttattttcttcgaga

SEQ ID NO: 1914224 - DNA, 15 bp, Homo sapiens
tattttcttcgagac

SEQ ID NO: 1914225 - DNA, 15 bp, Homo sapiens
attttcttcgagaca

SEQ ID NO: 1914226 - DNA, 15 bp, Homo sapiens
ttttcttcgagacag

SEQ ID NO: 1914227 - DNA, 15 bp, Homo sapiens
tttcttcgagacagg

SEQ ID NO: 1914228 - DNA, 15 bp, Homo sapiens
ttcttcgagacaggg

SEQ ID NO: 1914229 - DNA, 15 bp, Homo sapiens
tcttcgagacagggt

SEQ ID NO: 1914230 - DNA, 15 bp, Homo sapiens
cttcgagacagggtc

SEQ ID NO: 1914231 - DNA, 15 bp, Homo sapiens
ttcgagacagggtct

SEQ ID NO: 1914232 - DNA, 15 bp, Homo sapiens
tcgagacagggtctc

SEQ ID NO: 1914233 - DNA, 15 bp, Homo sapiens
cgagacagggtctcg

SEQ ID NO: 1914234 - DNA, 15 bp, Homo sapiens
gacagggtctcgctc

SEQ ID NO: 1914235 - DNA, 15 bp, Homo sapiens
acagggtctcgctcg

SEQ ID NO: 1914236 - DNA, 15 bp, Homo sapiens
cagggtctcgctcgg

SEQ ID NO: 1914237 - DNA, 15 bp, Homo sapiens
agggtctcgctcggt

SEQ ID NO: 1914238 - DNA, 15 bp, Homo sapiens
gggtctcgctcggtc

SEQ ID NO: 1914239 - DNA, 15 bp, Homo sapiens
ggtctcgctcggtcg

SEQ ID NO: 1914240 - DNA, 15 bp, Homo sapiens
gtctcgctcggtcgc

SEQ ID NO: 1914241 - DNA, 15 bp, Homo sapiens
tctcgctcggtcgcc

SEQ ID NO: 1914242 - DNA, 15 bp, Homo sapiens
ctcgctcggtcgccc

SEQ ID NO: 1914243 - DNA, 15 bp, Homo sapiens
tcgctcggtcgccca

SEQ ID NO: 1914244 - DNA, 15 bp, Homo sapiens
cgctcggtcgcccag

SEQ ID NO: 1914245 - DNA, 15 bp, Homo sapiens
gctcggtcgcccaga

SEQ ID NO: 1914246 - DNA, 15 bp, Homo sapiens
ctcggtcgcccagac

SEQ ID NO: 1914247 - DNA, 15 bp, Homo sapiens
tcggtcgcccagact

SEQ ID NO: 1914248 - DNA, 15 bp, Homo sapiens
cggtcgcccagactg

SEQ ID NO: 1914249 - DNA, 15 bp, Homo sapiens
ggtcgcccagactgg

SEQ ID NO: 1914250 - DNA, 15 bp, Homo sapiens
gtcgcccagactgga

SEQ ID NO: 1914251 - DNA, 15 bp, Homo sapiens
tcgcccagactggag

SEQ ID NO: 1914252 - DNA, 15 bp, Homo sapiens
cgcccagactggagg

SEQ ID NO: 1914253 - DNA, 15 bp, Homo sapiens
gcccagactggaggg

SEQ ID NO: 1914254 - DNA, 15 bp, Homo sapiens
cccagactggagggc

SEQ ID NO: 1914255 - DNA, 15 bp, Homo sapiens
ccagactggagggca

SEQ ID NO: 1914256 - DNA, 15 bp, Homo sapiens
cagactggagggcag

SEQ ID NO: 1914257 - DNA, 15 bp, Homo sapiens
agactggagggcagt

SEQ ID NO: 1914258 - DNA, 15 bp, Homo sapiens
gactggagggcagtg

SEQ ID NO: 1914259 - DNA, 15 bp, Homo sapiens
actggagggcagtgg

SEQ ID NO: 1914260 - DNA, 15 bp, Homo sapiens
ctggagggcagtggt

SEQ ID NO: 1914261 - DNA, 15 bp, Homo sapiens
tggagggcagtggtg

SEQ ID NO: 1914262 - DNA, 15 bp, Homo sapiens
ggagggcagtggtgc

SEQ ID NO: 1914263 - DNA, 15 bp, Homo sapiens
gagggcagtggtgca

SEQ ID NO: 1914264 - DNA, 15 bp, Homo sapiens
agggcagtggtgcaa

SEQ ID NO: 1914265 - DNA, 15 bp, Homo sapiens
gggcagtggtgcaat

SEQ ID NO: 1914266 - DNA, 15 bp, Homo sapiens
ggcagtggtgcaatc

SEQ ID NO: 1914267 - DNA, 15 bp, Homo sapiens
cctcagcctccagaa

SEQ ID NO: 1914268 - DNA, 15 bp, Homo sapiens
ggactacaggtgcag

SEQ ID NO: 1914269 - DNA, 15 bp, Homo sapiens
gactacaggtgcagg

SEQ ID NO: 1914270 - DNA, 15 bp, Homo sapiens
actacaggtgcaggc

SEQ ID NO: 1914271 - DNA, 15 bp, Homo sapiens
ctacaggtgcaggcc

SEQ ID NO: 1914272 - DNA, 15 bp, Homo sapiens
tacaggtgcaggcca

SEQ ID NO: 1914273 - DNA, 15 bp, Homo sapiens
acaggtgcaggccac

SEQ ID NO: 1914274 - DNA, 15 bp, Homo sapiens
caggtgcaggccacc

SEQ ID NO: 1914275 - DNA, 15 bp, Homo sapiens
aggtgcaggccacca

SEQ ID NO: 1914276 - DNA, 15 bp, Homo sapiens
ggtgcaggccaccat

SEQ ID NO: 1914277 - DNA, 15 bp, Homo sapiens
gtgcaggccaccatg

SEQ ID NO: 1914278 - DNA, 15 bp, Homo sapiens
tgcaggccaccatgc

SEQ ID NO: 1914279 - DNA, 15 bp, Homo sapiens
gcaggccaccatgcc

SEQ ID NO: 1914280 - DNA, 15 bp, Homo sapiens
caggccaccatgccc

SEQ ID NO: 1914281 - DNA, 15 bp, Homo sapiens
aggccaccatgccca

SEQ ID NO: 1914282 - DNA, 15 bp, Homo sapiens
ggccaccatgcccaa

SEQ ID NO: 1914283 - DNA, 15 bp, Homo sapiens
gccaccatgcccaac

SEQ ID NO: 1914284 - DNA, 15 bp, Homo sapiens
caccatgcccaactt

SEQ ID NO: 1914285 - DNA, 15 bp, Homo sapiens
accatgcccaacttt

SEQ ID NO: 1914286 - DNA, 15 bp, Homo sapiens
ccatgcccaactttt

SEQ ID NO: 1914287 - DNA, 15 bp, Homo sapiens
catgcccaacttttt

SEQ ID NO: 1914288 - DNA, 15 bp, Homo sapiens
atgcccaactttttt

SEQ ID NO: 1914289 - DNA, 15 bp, Homo sapiens
tgcccaacttttttc

SEQ ID NO: 1914290 - DNA, 15 bp, Homo sapiens
gcccaacttttttct

SEQ ID NO: 1914291 - DNA, 15 bp, Homo sapiens
cccaacttttttctt

SEQ ID NO: 1914292 - DNA, 15 bp, Homo sapiens
ccaacttttttcttt

SEQ ID NO: 1914293 - DNA, 15 bp, Homo sapiens
caacttttttctttt

SEQ ID NO: 1914294 - DNA, 15 bp, Homo sapiens
aacttttttcttttt

SEQ ID NO: 1914295 - DNA, 15 bp, Homo sapiens
acttttttctttttt

SEQ ID NO: 1914296 - DNA, 15 bp, Homo sapiens
ttcttttttttgtag

SEQ ID NO: 1914297 - DNA, 15 bp, Homo sapiens
tcttttttttgtaga

SEQ ID NO: 1914298 - DNA, 15 bp, Homo sapiens
cttttttttgtagat

SEQ ID NO: 1914299 - DNA, 15 bp, Homo sapiens
ttttttttgtagata

SEQ ID NO: 1914300 - DNA, 15 bp, Homo sapiens
tttttttgtagatac

SEQ ID NO: 1914301 - DNA, 15 bp, Homo sapiens
ttttttgtagatacg

SEQ ID NO: 1914302 - DNA, 15 bp, Homo sapiens
tttttgtagatacgg

SEQ ID NO: 1914303 - DNA, 15 bp, Homo sapiens
ttttgtagatacggg

SEQ ID NO: 1914304 - DNA, 15 bp, Homo sapiens
tttgtagatacgggt

SEQ ID NO: 1914305 - DNA, 15 bp, Homo sapiens
ttgtagatacgggtt

SEQ ID NO: 1914306 - DNA, 15 bp, Homo sapiens
tgtagatacgggttc

SEQ ID NO: 1914307 - DNA, 15 bp, Homo sapiens
gtagatacgggttct

SEQ ID NO: 1914308 - DNA, 15 bp, Homo sapiens
tagatacgggttctc

SEQ ID NO: 1914309 - DNA, 15 bp, Homo sapiens
agatacgggttctca

SEQ ID NO: 1914310 - DNA, 15 bp, Homo sapiens
gatacgggttctcac

SEQ ID NO: 1914311 - DNA, 15 bp, Homo sapiens
atacgggttctcact

SEQ ID NO: 1914312 - DNA, 15 bp, Homo sapiens
tacgggttctcacta

SEQ ID NO: 1914313 - DNA, 15 bp, Homo sapiens
acgggttctcactat

SEQ ID NO: 1914314 - DNA, 15 bp, Homo sapiens
cgggttctcactatg

SEQ ID NO: 1914315 - DNA, 15 bp, Homo sapiens
gggttctcactatgc

SEQ ID NO: 1914316 - DNA, 15 bp, Homo sapiens
ggttctcactatgct

SEQ ID NO: 1914317 - DNA, 15 bp, Homo sapiens
gttctcactatgctg

SEQ ID NO: 1914318 - DNA, 15 bp, Homo sapiens
ttctcactatgctgc

SEQ ID NO: 1914319 - DNA, 15 bp, Homo sapiens
tctcactatgctgcc

SEQ ID NO: 1914320 - DNA, 15 bp, Homo sapiens
ctcactatgctgccc

SEQ ID NO: 1914321 - DNA, 15 bp, Homo sapiens
tcactatgctgccca

SEQ ID NO: 1914322 - DNA, 15 bp, Homo sapiens
cactatgctgcccag

SEQ ID NO: 1914323 - DNA, 15 bp, Homo sapiens
actatgctgcccagg

SEQ ID NO: 1914324 - DNA, 15 bp, Homo sapiens
ctatgctgcccaggc

SEQ ID NO: 1914325 - DNA, 15 bp, Homo sapiens
tatgctgcccaggct

SEQ ID NO: 1914326 - DNA, 15 bp, Homo sapiens
atgctgcccaggcta

SEQ ID NO: 1914327 - DNA, 15 bp, Homo sapiens
tgctgcccaggctag

SEQ ID NO: 1914328 - DNA, 15 bp, Homo sapiens
gctgcccaggctagt

SEQ ID NO: 1914329 - DNA, 15 bp, Homo sapiens
ctgcccaggctagtc

SEQ ID NO: 1914330 - DNA, 15 bp, Homo sapiens
tagtcttgaactcct

SEQ ID NO: 1914331 - DNA, 15 bp, Homo sapiens
agtcttgaactcctg

SEQ ID NO: 1914332 - DNA, 15 bp, Homo sapiens
tcttgaactcctgga

SEQ ID NO: 1914333 - DNA, 15 bp, Homo sapiens
ctcctggactcaagc

SEQ ID NO: 1914334 - DNA, 15 bp, Homo sapiens
tcctggactcaagca

SEQ ID NO: 1914335 - DNA, 15 bp, Homo sapiens
cctggactcaagcag

SEQ ID NO: 1914336 - DNA, 15 bp, Homo sapiens
ctggactcaagcagt

SEQ ID NO: 1914337 - DNA, 15 bp, Homo sapiens
tggactcaagcagtc

SEQ ID NO: 1914338 - DNA, 15 bp, Homo sapiens
ggactcaagcagtcc

SEQ ID NO: 1914339 - DNA, 15 bp, Homo sapiens
gactcaagcagtcct

SEQ ID NO: 1914340 - DNA, 15 bp, Homo sapiens
actcaagcagtcctc

SEQ ID NO: 1914341 - DNA, 15 bp, Homo sapiens
caagcagtcctccct

SEQ ID NO: 1914342 - DNA, 15 bp, Homo sapiens
aagcagtcctccctc

SEQ ID NO: 1914343 - DNA, 15 bp, Homo sapiens
agcagtcctccctct

SEQ ID NO: 1914344 - DNA, 15 bp, Homo sapiens
cagtcctccctcttc

SEQ ID NO: 1914345 - DNA, 15 bp, Homo sapiens
agtcctccctcttct

SEQ ID NO: 1914346 - DNA, 15 bp, Homo sapiens
gtcctccctcttctg

SEQ ID NO: 1914347 - DNA, 15 bp, Homo sapiens
tcctccctcttctgc

SEQ ID NO: 1914348 - DNA, 15 bp, Homo sapiens
cctccctcttctgcc

SEQ ID NO: 1914349 - DNA, 15 bp, Homo sapiens
ctccctcttctgcct

SEQ ID NO: 1914350 - DNA, 15 bp, Homo sapiens
tccctcttctgcctc

SEQ ID NO: 1914351 - DNA, 15 bp, Homo sapiens
ccctcttctgcctcc

SEQ ID NO: 1914352 - DNA, 15 bp, Homo sapiens
cctcttctgcctccc

SEQ ID NO: 1914353 - DNA, 15 bp, Homo sapiens
ctcttctgcctccca

SEQ ID NO: 1914354 - DNA, 15 bp, Homo sapiens
tcttctgcctcccaa

SEQ ID NO: 1914355 - DNA, 15 bp, Homo sapiens
cttctgcctcccaaa

SEQ ID NO: 1914356 - DNA, 15 bp, Homo sapiens
ttctgcctcccaaaa

SEQ ID NO: 1914357 - DNA, 15 bp, Homo sapiens
tctgcctcccaaaat

SEQ ID NO: 1914358 - DNA, 15 bp, Homo sapiens
ctgcctcccaaaatg

SEQ ID NO: 1914359 - DNA, 15 bp, Homo sapiens
tgcctcccaaaatgc

SEQ ID NO: 1914360 - DNA, 15 bp, Homo sapiens
tcccaaaatgctgga

SEQ ID NO: 1914361 - DNA, 15 bp, Homo sapiens
cccaaaatgctggaa

SEQ ID NO: 1914362 - DNA, 15 bp, Homo sapiens
ccaaaatgctggaat

SEQ ID NO: 1914363 - DNA, 15 bp, Homo sapiens
caaaatgctggaatt

SEQ ID NO: 1914364 - DNA, 15 bp, Homo sapiens
aaaatgctggaatta

SEQ ID NO: 1914365 - DNA, 15 bp, Homo sapiens
aaatgctggaattac

SEQ ID NO: 1914366 - DNA, 15 bp, Homo sapiens
aatgctggaattaca

SEQ ID NO: 1914367 - DNA, 15 bp, Homo sapiens
atgctggaattacag

SEQ ID NO: 1914368 - DNA, 15 bp, Homo sapiens
tggaattacaggtga

SEQ ID NO: 1914369 - DNA, 15 bp, Homo sapiens
ggaattacaggtgag

SEQ ID NO: 1914370 - DNA, 15 bp, Homo sapiens
gaattacaggtgaga

SEQ ID NO: 1914371 - DNA, 15 bp, Homo sapiens
aattacaggtgagag

SEQ ID NO: 1914372 - DNA, 15 bp, Homo sapiens
caggtgagagccacc

SEQ ID NO: 1914373 - DNA, 15 bp, Homo sapiens
aggtgagagccacca

SEQ ID NO: 1914374 - DNA, 15 bp, Homo sapiens
ggtgagagccaccac

SEQ ID NO: 1914375 - DNA, 15 bp, Homo sapiens
gtgagagccaccaca

SEQ ID NO: 1914376 - DNA, 15 bp, Homo sapiens
tgagagccaccacac

SEQ ID NO: 1914377 - DNA, 15 bp, Homo sapiens
gagagccaccacacc

SEQ ID NO: 1914378 - DNA, 15 bp, Homo sapiens
agagccaccacacct

SEQ ID NO: 1914379 - DNA, 15 bp, Homo sapiens
ccaccacacctggtc

SEQ ID NO: 1914380 - DNA, 15 bp, Homo sapiens
caccacacctggtcc

SEQ ID NO: 1914381 - DNA, 15 bp, Homo sapiens
accacacctggtccc

SEQ ID NO: 1914382 - DNA, 15 bp, Homo sapiens
ccacacctggtccca

SEQ ID NO: 1914383 - DNA, 15 bp, Homo sapiens
cacacctggtcccaa

SEQ ID NO: 1914384 - DNA, 15 bp, Homo sapiens
acacctggtcccaac

SEQ ID NO: 1914385 - DNA, 15 bp, Homo sapiens
cacctggtcccaacc

SEQ ID NO: 1914386 - DNA, 15 bp, Homo sapiens
acctggtcccaaccc

SEQ ID NO: 1914387 - DNA, 15 bp, Homo sapiens
cctggtcccaaccca

SEQ ID NO: 1914388 - DNA, 15 bp, Homo sapiens
ctggtcccaacccac

SEQ ID NO: 1914389 - DNA, 15 bp, Homo sapiens
tggtcccaacccact

SEQ ID NO: 1914390 - DNA, 15 bp, Homo sapiens
ggtcccaacccactt

SEQ ID NO: 1914391 - DNA, 15 bp, Homo sapiens
gtcccaacccacttt

SEQ ID NO: 1914392 - DNA, 15 bp, Homo sapiens
tcccaacccactttc

SEQ ID NO: 1914393 - DNA, 15 bp, Homo sapiens
cccaacccactttcc

SEQ ID NO: 1914394 - DNA, 15 bp, Homo sapiens
ccaacccactttcct

SEQ ID NO: 1914395 - DNA, 15 bp, Homo sapiens
caacccactttcctc

SEQ ID NO: 1914396 - DNA, 15 bp, Homo sapiens
aacccactttcctca

SEQ ID NO: 1914397 - DNA, 15 bp, Homo sapiens
acccactttcctcac

SEQ ID NO: 1914398 - DNA, 15 bp, Homo sapiens
cccactttcctcacc

SEQ ID NO: 1914399 - DNA, 15 bp, Homo sapiens
ccactttcctcaccc

SEQ ID NO: 1914400 - DNA, 15 bp, Homo sapiens
cactttcctcaccca

SEQ ID NO: 1914401 - DNA, 15 bp, Homo sapiens
actttcctcacccac

SEQ ID NO: 1914402 - DNA, 15 bp, Homo sapiens
ctttcctcacccaca

SEQ ID NO: 1914403 - DNA, 15 bp, Homo sapiens
tttcctcacccacag

SEQ ID NO: 1914404 - DNA, 15 bp, Homo sapiens
ttcctcacccacagt

SEQ ID NO: 1914405 - DNA, 15 bp, Homo sapiens
tcctcacccacagtt

SEQ ID NO: 1914406 - DNA, 15 bp, Homo sapiens
cctcacccacagttc

SEQ ID NO: 1914407 - DNA, 15 bp, Homo sapiens
ctcacccacagttcc

SEQ ID NO: 1914408 - DNA, 15 bp, Homo sapiens
tcacccacagttcca

SEQ ID NO: 1914409 - DNA, 15 bp, Homo sapiens
cacccacagttccaa

SEQ ID NO: 1914410 - DNA, 15 bp, Homo sapiens
acccacagttccaaa

SEQ ID NO: 1914411 - DNA, 15 bp, Homo sapiens
cccacagttccaaac

SEQ ID NO: 1914412 - DNA, 15 bp, Homo sapiens
ccacagttccaaaca

SEQ ID NO: 1914413 - DNA, 15 bp, Homo sapiens
cacagttccaaacac

SEQ ID NO: 1914414 - DNA, 15 bp, Homo sapiens
acagttccaaacaca

SEQ ID NO: 1914415 - DNA, 15 bp, Homo sapiens
cagttccaaacacaa

SEQ ID NO: 1914416 - DNA, 15 bp, Homo sapiens
agttccaaacacaag

SEQ ID NO: 1914417 - DNA, 15 bp, Homo sapiens
gttccaaacacaagc

SEQ ID NO: 1914418 - DNA, 15 bp, Homo sapiens
ttccaaacacaagcc

SEQ ID NO: 1914419 - DNA, 15 bp, Homo sapiens
tccaaacacaagccc

SEQ ID NO: 1914420 - DNA, 15 bp, Homo sapiens
ccaaacacaagcccc

SEQ ID NO: 1914421 - DNA, 15 bp, Homo sapiens
caaacacaagcccct

SEQ ID NO: 1914422 - DNA, 15 bp, Homo sapiens
aaacacaagcccctc

SEQ ID NO: 1914423 - DNA, 15 bp, Homo sapiens
aacacaagcccctcc

SEQ ID NO: 1914424 - DNA, 15 bp, Homo sapiens
acacaagcccctccc

SEQ ID NO: 1914425 - DNA, 15 bp, Homo sapiens
cacaagcccctccca

SEQ ID NO: 1914426 - DNA, 15 bp, Homo sapiens
acaagcccctcccag

SEQ ID NO: 1914427 - DNA, 15 bp, Homo sapiens
caagcccctcccagc

SEQ ID NO: 1914428 - DNA, 15 bp, Homo sapiens
aagcccctcccagca

SEQ ID NO: 1914429 - DNA, 15 bp, Homo sapiens
agcccctcccagcaa

SEQ ID NO: 1914430 - DNA, 15 bp, Homo sapiens
gcccctcccagcaaa

SEQ ID NO: 1914431 - DNA, 15 bp, Homo sapiens
cccctcccagcaaaa

SEQ ID NO: 1914432 - DNA, 15 bp, Homo sapiens
ccctcccagcaaaat

SEQ ID NO: 1914433 - DNA, 15 bp, Homo sapiens
cctcccagcaaaatg

SEQ ID NO: 1914434 - DNA, 15 bp, Homo sapiens
ctcccagcaaaatgt

SEQ ID NO: 1914435 - DNA, 15 bp, Homo sapiens
tcccagcaaaatgta

SEQ ID NO: 1914436 - DNA, 15 bp, Homo sapiens
cccagcaaaatgtag

SEQ ID NO: 1914437 - DNA, 15 bp, Homo sapiens
ccagcaaaatgtagg

SEQ ID NO: 1914438 - DNA, 15 bp, Homo sapiens
cagcaaaatgtaggc

SEQ ID NO: 1914439 - DNA, 15 bp, Homo sapiens
agcaaaatgtaggca

SEQ ID NO: 1914440 - DNA, 15 bp, Homo sapiens
gcaaaatgtaggcac

SEQ ID NO: 1914441 - DNA, 15 bp, Homo sapiens
caaaatgtaggcaca

SEQ ID NO: 1914442 - DNA, 15 bp, Homo sapiens
aaaatgtaggcacaa

SEQ ID NO: 1914443 - DNA, 15 bp, Homo sapiens
aaatgtaggcacaag

SEQ ID NO: 1914444 - DNA, 15 bp, Homo sapiens
aatgtaggcacaagc

SEQ ID NO: 1914445 - DNA, 15 bp, Homo sapiens
atgtaggcacaagca

SEQ ID NO: 1914446 - DNA, 15 bp, Homo sapiens
tgtaggcacaagcaa

SEQ ID NO: 1914447 - DNA, 15 bp, Homo sapiens
gtaggcacaagcaaa

SEQ ID NO: 1914448 - DNA, 15 bp, Homo sapiens
taggcacaagcaaac

SEQ ID NO: 1914449 - DNA, 15 bp, Homo sapiens
aggcacaagcaaaca

SEQ ID NO: 1914450 - DNA, 15 bp, Homo sapiens
ggcacaagcaaacaa

SEQ ID NO: 1914451 - DNA, 15 bp, Homo sapiens
gcacaagcaaacaaa

SEQ ID NO: 1914452 - DNA, 15 bp, Homo sapiens
cacaagcaaacaaac

SEQ ID NO: 1914453 - DNA, 15 bp, Homo sapiens
acaagcaaacaaaca

SEQ ID NO: 1914454 - DNA, 15 bp, Homo sapiens
caagcaaacaaacaa

SEQ ID NO: 1914455 - DNA, 15 bp, Homo sapiens
aagcaaacaaacaaa

SEQ ID NO: 1914456 - DNA, 15 bp, Homo sapiens
agcaaacaaacaaaa

SEQ ID NO: 1914457 - DNA, 15 bp, Homo sapiens
gcaaacaaacaaaaa

SEQ ID NO: 1914458 - DNA, 15 bp, Homo sapiens
aaacaaacaaaaact

SEQ ID NO: 1914459 - DNA, 15 bp, Homo sapiens
aacaaacaaaaacta

SEQ ID NO: 1914460 - DNA, 15 bp, Homo sapiens
acaaacaaaaactac

SEQ ID NO: 1914461 - DNA, 15 bp, Homo sapiens
caaacaaaaactaca

SEQ ID NO: 1914462 - DNA, 15 bp, Homo sapiens
aaacaaaaactacaa

SEQ ID NO: 1914463 - DNA, 15 bp, Homo sapiens
aacaaaaactacaac

SEQ ID NO: 1914464 - DNA, 15 bp, Homo sapiens
acaaaaactacaacc

SEQ ID NO: 1914465 - DNA, 15 bp, Homo sapiens
caaaaactacaaccg

SEQ ID NO: 1914466 - DNA, 15 bp, Homo sapiens
aaaaactacaaccga

SEQ ID NO: 1914467 - DNA, 15 bp, Homo sapiens
aaaactacaaccgac

SEQ ID NO: 1914468 - DNA, 15 bp, Homo sapiens
aaactacaaccgact

SEQ ID NO: 1914469 - DNA, 15 bp, Homo sapiens
aactacaaccgactt

SEQ ID NO: 1914470 - DNA, 15 bp, Homo sapiens
actacaaccgacttc

SEQ ID NO: 1914471 - DNA, 15 bp, Homo sapiens
ctacaaccgacttct

SEQ ID NO: 1914472 - DNA, 15 bp, Homo sapiens
tacaaccgacttctt

SEQ ID NO: 1914473 - DNA, 15 bp, Homo sapiens
acaaccgacttcttc

SEQ ID NO: 1914474 - DNA, 15 bp, Homo sapiens
caaccgacttcttct

SEQ ID NO: 1914475 - DNA, 15 bp, Homo sapiens
aaccgacttcttctt

SEQ ID NO: 1914476 - DNA, 15 bp, Homo sapiens
accgacttcttctta

SEQ ID NO: 1914477 - DNA, 15 bp, Homo sapiens
ccgacttcttcttag

SEQ ID NO: 1914478 - DNA, 15 bp, Homo sapiens
cgacttcttcttagc

SEQ ID NO: 1914479 - DNA, 15 bp, Homo sapiens
gacttcttcttagcc

SEQ ID NO: 1914480 - DNA, 15 bp, Homo sapiens
acttcttcttagccc

SEQ ID NO: 1914481 - DNA, 15 bp, Homo sapiens
cttcttcttagccca

SEQ ID NO: 1914482 - DNA, 15 bp, Homo sapiens
ttcttcttagcccat

SEQ ID NO: 1914483 - DNA, 15 bp, Homo sapiens
tcttcttagcccatt

SEQ ID NO: 1914484 - DNA, 15 bp, Homo sapiens
cttcttagcccattg

SEQ ID NO: 1914485 - DNA, 15 bp, Homo sapiens
ttcttagcccattgc

SEQ ID NO: 1914486 - DNA, 15 bp, Homo sapiens
tcttagcccattgcc

SEQ ID NO: 1914487 - DNA, 15 bp, Homo sapiens
cttagcccattgcct

SEQ ID NO: 1914488 - DNA, 15 bp, Homo sapiens
ttagcccattgccta

SEQ ID NO: 1914489 - DNA, 15 bp, Homo sapiens
tagcccattgcctaa

SEQ ID NO: 1914490 - DNA, 15 bp, Homo sapiens
agcccattgcctaaa

SEQ ID NO: 1914491 - DNA, 15 bp, Homo sapiens
gcccattgcctaaat

SEQ ID NO: 1914492 - DNA, 15 bp, Homo sapiens
cccattgcctaaatt

SEQ ID NO: 1914493 - DNA, 15 bp, Homo sapiens
ccattgcctaaattg

SEQ ID NO: 1914494 - DNA, 15 bp, Homo sapiens
cattgcctaaattgt

SEQ ID NO: 1914495 - DNA, 15 bp, Homo sapiens
attgcctaaattgtc

SEQ ID NO: 1914496 - DNA, 15 bp, Homo sapiens
ttgcctaaattgtct

SEQ ID NO: 1914497 - DNA, 15 bp, Homo sapiens
tgcctaaattgtctg

SEQ ID NO: 1914498 - DNA, 15 bp, Homo sapiens
gcctaaattgtctgg

SEQ ID NO: 1914499 - DNA, 15 bp, Homo sapiens
cctaaattgtctggg

SEQ ID NO: 1914500 - DNA, 15 bp, Homo sapiens
ctaaattgtctgggt

SEQ ID NO: 1914501 - DNA, 15 bp, Homo sapiens
taaattgtctgggtt

SEQ ID NO: 1914502 - DNA, 15 bp, Homo sapiens
aaattgtctgggtta

SEQ ID NO: 1914503 - DNA, 15 bp, Homo sapiens
aattgtctgggttag

SEQ ID NO: 1914504 - DNA, 15 bp, Homo sapiens
attgtctgggttagt

SEQ ID NO: 1914505 - DNA, 15 bp, Homo sapiens
ttgtctgggttagtc

SEQ ID NO: 1914506 - DNA, 15 bp, Homo sapiens
tgtctgggttagtcc

SEQ ID NO: 1914507 - DNA, 15 bp, Homo sapiens
gtctgggttagtccc

SEQ ID NO: 1914508 - DNA, 15 bp, Homo sapiens
tctgggttagtccca

SEQ ID NO: 1914509 - DNA, 15 bp, Homo sapiens
ctgggttagtcccag

SEQ ID NO: 1914510 - DNA, 15 bp, Homo sapiens
tgggttagtcccaga

SEQ ID NO: 1914511 - DNA, 15 bp, Homo sapiens
gggttagtcccagat

SEQ ID NO: 1914512 - DNA, 15 bp, Homo sapiens
ggttagtcccagatt

SEQ ID NO: 1914513 - DNA, 15 bp, Homo sapiens
gttagtcccagatta

SEQ ID NO: 1914514 - DNA, 15 bp, Homo sapiens
ttagtcccagattat

SEQ ID NO: 1914515 - DNA, 15 bp, Homo sapiens
tagtcccagattata

SEQ ID NO: 1914516 - DNA, 15 bp, Homo sapiens
agtcccagattataa

SEQ ID NO: 1914517 - DNA, 15 bp, Homo sapiens
gtcccagattataac

SEQ ID NO: 1914518 - DNA, 15 bp, Homo sapiens
tcccagattataacc

SEQ ID NO: 1914519 - DNA, 15 bp, Homo sapiens
cccagattataacct

SEQ ID NO: 1914520 - DNA, 15 bp, Homo sapiens
ccagattataaccta

SEQ ID NO: 1914521 - DNA, 15 bp, Homo sapiens
cagattataacctat

SEQ ID NO: 1914522 - DNA, 15 bp, Homo sapiens
agattataacctatc

SEQ ID NO: 1914523 - DNA, 15 bp, Homo sapiens
gattataacctatca

SEQ ID NO: 1914524 - DNA, 15 bp, Homo sapiens
attataacctatcaa

SEQ ID NO: 1914525 - DNA, 15 bp, Homo sapiens
ttataacctatcaaa

SEQ ID NO: 1914526 - DNA, 15 bp, Homo sapiens
tataacctatcaaac

SEQ ID NO: 1914527 - DNA, 15 bp, Homo sapiens
ataacctatcaaaca

SEQ ID NO: 1914528 - DNA, 15 bp, Homo sapiens
taacctatcaaacag

SEQ ID NO: 1914529 - DNA, 15 bp, Homo sapiens
aacctatcaaacagg

SEQ ID NO: 1914530 - DNA, 15 bp, Homo sapiens
acctatcaaacaggg

SEQ ID NO: 1914531 - DNA, 15 bp, Homo sapiens
cctatcaaacaggga

SEQ ID NO: 1914532 - DNA, 15 bp, Homo sapiens
ctatcaaacagggac

SEQ ID NO: 1914533 - DNA, 15 bp, Homo sapiens
tatcaaacagggacc

SEQ ID NO: 1914534 - DNA, 15 bp, Homo sapiens
atcaaacagggaccc

SEQ ID NO: 1914535 - DNA, 15 bp, Homo sapiens
tcaaacagggaccca

SEQ ID NO: 1914536 - DNA, 15 bp, Homo sapiens
caaacagggacccac

SEQ ID NO: 1914537 - DNA, 15 bp, Homo sapiens
aaacagggacccaca

SEQ ID NO: 1914538 - DNA, 15 bp, Homo sapiens
aacagggacccacag

SEQ ID NO: 1914539 - DNA, 15 bp, Homo sapiens
acagggacccacaga

SEQ ID NO: 1914540 - DNA, 15 bp, Homo sapiens
cagggacccacagag

SEQ ID NO: 1914541 - DNA, 15 bp, Homo sapiens
agggacccacagagt

SEQ ID NO: 1914542 - DNA, 15 bp, Homo sapiens
gggacccacagagtc

SEQ ID NO: 1914543 - DNA, 15 bp, Homo sapiens
ggacccacagagtca

SEQ ID NO: 1914544 - DNA, 15 bp, Homo sapiens
gacccacagagtcaa

SEQ ID NO: 1914545 - DNA, 15 bp, Homo sapiens
acccacagagtcaaa

SEQ ID NO: 1914546 - DNA, 15 bp, Homo sapiens
cccacagagtcaaag

SEQ ID NO: 1914547 - DNA, 15 bp, Homo sapiens
ccacagagtcaaagc

SEQ ID NO: 1914548 - DNA, 15 bp, Homo sapiens
cacagagtcaaagca

SEQ ID NO: 1914549 - DNA, 15 bp, Homo sapiens
acagagtcaaagcag

SEQ ID NO: 1914550 - DNA, 15 bp, Homo sapiens
cagagtcaaagcagg

SEQ ID NO: 1914551 - DNA, 15 bp, Homo sapiens
agagtcaaagcaggc

SEQ ID NO: 1914552 - DNA, 15 bp, Homo sapiens
gagtcaaagcaggct

SEQ ID NO: 1914553 - DNA, 15 bp, Homo sapiens
agtcaaagcaggctg

SEQ ID NO: 1914554 - DNA, 15 bp, Homo sapiens
gtcaaagcaggctgt

SEQ ID NO: 1914555 - DNA, 15 bp, Homo sapiens
tcaaagcaggctgtc

SEQ ID NO: 1914556 - DNA, 15 bp, Homo sapiens
caaagcaggctgtcc

SEQ ID NO: 1914557 - DNA, 15 bp, Homo sapiens
aaagcaggctgtccg

SEQ ID NO: 1914558 - DNA, 15 bp, Homo sapiens
aagcaggctgtccga

SEQ ID NO: 1914559 - DNA, 15 bp, Homo sapiens
agcaggctgtccgat

SEQ ID NO: 1914560 - DNA, 15 bp, Homo sapiens
gcaggctgtccgatg

SEQ ID NO: 1914561 - DNA, 15 bp, Homo sapiens
caggctgtccgatgg

SEQ ID NO: 1914562 - DNA, 15 bp, Homo sapiens
aggctgtccgatggc

SEQ ID NO: 1914563 - DNA, 15 bp, Homo sapiens
ggctgtccgatggca

SEQ ID NO: 1914564 - DNA, 15 bp, Homo sapiens
gctgtccgatggcat

SEQ ID NO: 1914565 - DNA, 15 bp, Homo sapiens
ctgtccgatggcatt

SEQ ID NO: 1914566 - DNA, 15 bp, Homo sapiens
tgtccgatggcattg

SEQ ID NO: 1914567 - DNA, 15 bp, Homo sapiens
gtccgatggcattgc

SEQ ID NO: 1914568 - DNA, 15 bp, Homo sapiens
tccgatggcattgct

SEQ ID NO: 1914569 - DNA, 15 bp, Homo sapiens
ccgatggcattgctg

SEQ ID NO: 1914570 - DNA, 15 bp, Homo sapiens
cgatggcattgctgc

SEQ ID NO: 1914571 - DNA, 15 bp, Homo sapiens
gatggcattgctgcc

SEQ ID NO: 1914572 - DNA, 15 bp, Homo sapiens
atggcattgctgcca

SEQ ID NO: 1914573 - DNA, 15 bp, Homo sapiens
tggcattgctgccag

SEQ ID NO: 1914574 - DNA, 15 bp, Homo sapiens
ggcattgctgccagg

SEQ ID NO: 1914575 - DNA, 15 bp, Homo sapiens
gcattgctgccagga

SEQ ID NO: 1914576 - DNA, 15 bp, Homo sapiens
cattgctgccaggag

SEQ ID NO: 1914577 - DNA, 15 bp, Homo sapiens
attgctgccaggagt

SEQ ID NO: 1914578 - DNA, 15 bp, Homo sapiens
ttgctgccaggagtc

SEQ ID NO: 1914579 - DNA, 15 bp, Homo sapiens
tgctgccaggagtcc

SEQ ID NO: 1914580 - DNA, 15 bp, Homo sapiens
gctgccaggagtcct

SEQ ID NO: 1914581 - DNA, 15 bp, Homo sapiens
ctgccaggagtcctg

SEQ ID NO: 1914582 - DNA, 15 bp, Homo sapiens
tgccaggagtcctga

SEQ ID NO: 1914583 - DNA, 15 bp, Homo sapiens
gccaggagtcctgag

SEQ ID NO: 1914584 - DNA, 15 bp, Homo sapiens
ccaggagtcctgagg

SEQ ID NO: 1914585 - DNA, 15 bp, Homo sapiens
caggagtcctgaggc

SEQ ID NO: 1914586 - DNA, 15 bp, Homo sapiens
aggagtcctgaggca

SEQ ID NO: 1914587 - DNA, 15 bp, Homo sapiens
ggagtcctgaggcag

SEQ ID NO: 1914588 - DNA, 15 bp, Homo sapiens
gagtcctgaggcagg

SEQ ID NO: 1914589 - DNA, 15 bp, Homo sapiens
agtcctgaggcaggc

SEQ ID NO: 1914590 - DNA, 15 bp, Homo sapiens
gtcctgaggcaggcc

SEQ ID NO: 1914591 - DNA, 15 bp, Homo sapiens
tcctgaggcaggccc

SEQ ID NO: 1914592 - DNA, 15 bp, Homo sapiens
cctgaggcaggcccc

SEQ ID NO: 1914593 - DNA, 15 bp, Homo sapiens
ctgaggcaggcccct

SEQ ID NO: 1914594 - DNA, 15 bp, Homo sapiens
tgaggcaggcccctc

SEQ ID NO: 1914595 - DNA, 15 bp, Homo sapiens
gaggcaggcccctcc

SEQ ID NO: 1914596 - DNA, 15 bp, Homo sapiens
aggcaggcccctcca

SEQ ID NO: 1914597 - DNA, 15 bp, Homo sapiens
ggcaggcccctccac

SEQ ID NO: 1914598 - DNA, 15 bp, Homo sapiens
gcaggcccctccacc

SEQ ID NO: 1914599 - DNA, 15 bp, Homo sapiens
caggcccctccacct

SEQ ID NO: 1914600 - DNA, 15 bp, Homo sapiens
aggcccctccacctc

SEQ ID NO: 1914601 - DNA, 15 bp, Homo sapiens
ggcccctccacctct

SEQ ID NO: 1914602 - DNA, 15 bp, Homo sapiens
gcccctccacctctt

SEQ ID NO: 1914603 - DNA, 15 bp, Homo sapiens
cccctccacctcttg

SEQ ID NO: 1914604 - DNA, 15 bp, Homo sapiens
ccctccacctcttgg

SEQ ID NO: 1914605 - DNA, 15 bp, Homo sapiens
cctccacctcttggg

SEQ ID NO: 1914606 - DNA, 15 bp, Homo sapiens
ctccacctcttgggt

SEQ ID NO: 1914607 - DNA, 15 bp, Homo sapiens
tccacctcttgggtg

SEQ ID NO: 1914608 - DNA, 15 bp, Homo sapiens
ccacctcttgggtga

SEQ ID NO: 1914609 - DNA, 15 bp, Homo sapiens
cacctcttgggtgac

SEQ ID NO: 1914610 - DNA, 15 bp, Homo sapiens
acctcttgggtgacc

SEQ ID NO: 1914611 - DNA, 15 bp, Homo sapiens
cctcttgggtgacct

SEQ ID NO: 1914612 - DNA, 15 bp, Homo sapiens
ctcttgggtgacctg

SEQ ID NO: 1914613 - DNA, 15 bp, Homo sapiens
tcttgggtgacctgg

SEQ ID NO: 1914614 - DNA, 15 bp, Homo sapiens
cttgggtgacctgga

SEQ ID NO: 1914615 - DNA, 15 bp, Homo sapiens
ttgggtgacctggag

SEQ ID NO: 1914616 - DNA, 15 bp, Homo sapiens
tgggtgacctggagc

SEQ ID NO: 1914617 - DNA, 15 bp, Homo sapiens
gggtgacctggagca

SEQ ID NO: 1914618 - DNA, 15 bp, Homo sapiens
ggtgacctggagcag

SEQ ID NO: 1914619 - DNA, 15 bp, Homo sapiens
gtgacctggagcagt

SEQ ID NO: 1914620 - DNA, 15 bp, Homo sapiens
tgacctggagcagtg

SEQ ID NO: 1914621 - DNA, 15 bp, Homo sapiens
gacctggagcagtgg

SEQ ID NO: 1914622 - DNA, 15 bp, Homo sapiens
acctggagcagtggg

SEQ ID NO: 1914623 - DNA, 15 bp, Homo sapiens
cctggagcagtgggg

SEQ ID NO: 1914624 - DNA, 15 bp, Homo sapiens
ctggagcagtggggg

SEQ ID NO: 1914625 - DNA, 15 bp, Homo sapiens
tggagcagtgggggc

SEQ ID NO: 1914626 - DNA, 15 bp, Homo sapiens
ggagcagtgggggca

SEQ ID NO: 1914627 - DNA, 15 bp, Homo sapiens
gagcagtgggggcag

SEQ ID NO: 1914628 - DNA, 15 bp, Homo sapiens
agcagtgggggcagg

SEQ ID NO: 1914629 - DNA, 15 bp, Homo sapiens
gcagtgggggcagga

SEQ ID NO: 1914630 - DNA, 15 bp, Homo sapiens
cagtgggggcaggag

SEQ ID NO: 1914631 - DNA, 15 bp, Homo sapiens
agtgggggcaggagg

SEQ ID NO: 1914632 - DNA, 15 bp, Homo sapiens
gggggcaggagggct

SEQ ID NO: 1914633 - DNA, 15 bp, Homo sapiens
ggggcaggagggctg

SEQ ID NO: 1914634 - DNA, 15 bp, Homo sapiens
gggcaggagggctgg

SEQ ID NO: 1914635 - DNA, 15 bp, Homo sapiens
ggcaggagggctggg

SEQ ID NO: 1914636 - DNA, 15 bp, Homo sapiens
gcaggagggctgggg

SEQ ID NO: 1914637 - DNA, 15 bp, Homo sapiens
caggagggctggggg

SEQ ID NO: 1914638 - DNA, 15 bp, Homo sapiens
aggagggctgggggt

SEQ ID NO: 1914639 - DNA, 15 bp, Homo sapiens
ggagggctgggggtc

SEQ ID NO: 1914640 - DNA, 15 bp, Homo sapiens
gagggctgggggtct

SEQ ID NO: 1914641 - DNA, 15 bp, Homo sapiens
agggctgggggtctc

SEQ ID NO: 1914642 - DNA, 15 bp, Homo sapiens
gggctgggggtctca

SEQ ID NO: 1914643 - DNA, 15 bp, Homo sapiens
ggctgggggtctcac

SEQ ID NO: 1914644 - DNA, 15 bp, Homo sapiens
gctgggggtctcacc

SEQ ID NO: 1914645 - DNA, 15 bp, Homo sapiens
ctgggggtctcacct

SEQ ID NO: 1914646 - DNA, 15 bp, Homo sapiens
tgggggtctcacctt

SEQ ID NO: 1914647 - DNA, 15 bp, Homo sapiens
gggggtctcaccttc

SEQ ID NO: 1914648 - DNA, 15 bp, Homo sapiens
ggggtctcaccttca

SEQ ID NO: 1914649 - DNA, 15 bp, Homo sapiens
gggtctcaccttcac

SEQ ID NO: 1914650 - DNA, 15 bp, Homo sapiens
ggtctcaccttcacc

SEQ ID NO: 1914651 - DNA, 15 bp, Homo sapiens
gtctcaccttcacct

SEQ ID NO: 1914652 - DNA, 15 bp, Homo sapiens
tctcaccttcacctg

SEQ ID NO: 1914653 - DNA, 15 bp, Homo sapiens
ctcaccttcacctgg

SEQ ID NO: 1914654 - DNA, 15 bp, Homo sapiens
tcaccttcacctgga

SEQ ID NO: 1914655 - DNA, 15 bp, Homo sapiens
caccttcacctggaa

SEQ ID NO: 1914656 - DNA, 15 bp, Homo sapiens
accttcacctggaac

SEQ ID NO: 1914657 - DNA, 15 bp, Homo sapiens
ccttcacctggaaca

SEQ ID NO: 1914658 - DNA, 15 bp, Homo sapiens
cttcacctggaacac

SEQ ID NO: 1914659 - DNA, 15 bp, Homo sapiens
ttcacctggaacaca

SEQ ID NO: 1914660 - DNA, 15 bp, Homo sapiens
tcacctggaacacaa

SEQ ID NO: 1914661 - DNA, 15 bp, Homo sapiens
cacctggaacacaag

SEQ ID NO: 1914662 - DNA, 15 bp, Homo sapiens
acctggaacacaagc

SEQ ID NO: 1914663 - DNA, 15 bp, Homo sapiens
cctggaacacaagct

SEQ ID NO: 1914664 - DNA, 15 bp, Homo sapiens
ctggaacacaagctc

SEQ ID NO: 1914665 - DNA, 15 bp, Homo sapiens
tggaacacaagctca

SEQ ID NO: 1914666 - DNA, 15 bp, Homo sapiens
ggaacacaagctcat

SEQ ID NO: 1914667 - DNA, 15 bp, Homo sapiens
gaacacaagctcatt

SEQ ID NO: 1914668 - DNA, 15 bp, Homo sapiens
aacacaagctcattg

SEQ ID NO: 1914669 - DNA, 15 bp, Homo sapiens
acacaagctcattgc

SEQ ID NO: 1914670 - DNA, 15 bp, Homo sapiens
cacaagctcattgct

SEQ ID NO: 1914671 - DNA, 15 bp, Homo sapiens
acaagctcattgctg

SEQ ID NO: 1914672 - DNA, 15 bp, Homo sapiens
caagctcattgctgc

SEQ ID NO: 1914673 - DNA, 15 bp, Homo sapiens
aagctcattgctgcc

SEQ ID NO: 1914674 - DNA, 15 bp, Homo sapiens
agctcattgctgcca

SEQ ID NO: 1914675 - DNA, 15 bp, Homo sapiens
gctcattgctgccaa

SEQ ID NO: 1914676 - DNA, 15 bp, Homo sapiens
ctcattgctgccaac

SEQ ID NO: 1914677 - DNA, 15 bp, Homo sapiens
tcattgctgccaaca

SEQ ID NO: 1914678 - DNA, 15 bp, Homo sapiens
cattgctgccaacac

SEQ ID NO: 1914679 - DNA, 15 bp, Homo sapiens
attgctgccaacact

SEQ ID NO: 1914680 - DNA, 15 bp, Homo sapiens
ttgctgccaacactg

SEQ ID NO: 1914681 - DNA, 15 bp, Homo sapiens
tgctgccaacactga

SEQ ID NO: 1914682 - DNA, 15 bp, Homo sapiens
gctgccaacactgaa

SEQ ID NO: 1914683 - DNA, 15 bp, Homo sapiens
ctgccaacactgaac

SEQ ID NO: 1914684 - DNA, 15 bp, Homo sapiens
tgccaacactgaact

SEQ ID NO: 1914685 - DNA, 15 bp, Homo sapiens
gccaacactgaactg

SEQ ID NO: 1914686 - DNA, 15 bp, Homo sapiens
ccaacactgaactga

SEQ ID NO: 1914687 - DNA, 15 bp, Homo sapiens
caacactgaactgag

SEQ ID NO: 1914688 - DNA, 15 bp, Homo sapiens
aacactgaactgaga

SEQ ID NO: 1914689 - DNA, 15 bp, Homo sapiens
acactgaactgagac

SEQ ID NO: 1914690 - DNA, 15 bp, Homo sapiens
cactgaactgagact

SEQ ID NO: 1914691 - DNA, 15 bp, Homo sapiens
actgaactgagactc

SEQ ID NO: 1914692 - DNA, 15 bp, Homo sapiens
ctgaactgagactca

SEQ ID NO: 1914693 - DNA, 15 bp, Homo sapiens
tgaactgagactcaa

SEQ ID NO: 1914694 - DNA, 15 bp, Homo sapiens
gaactgagactcaaa

SEQ ID NO: 1914695 - DNA, 15 bp, Homo sapiens
aactgagactcaaac

SEQ ID NO: 1914696 - DNA, 15 bp, Homo sapiens
actgagactcaaaca

SEQ ID NO: 1914697 - DNA, 15 bp, Homo sapiens
ctgagactcaaacag

SEQ ID NO: 1914698 - DNA, 15 bp, Homo sapiens
tgagactcaaacagg

SEQ ID NO: 1914699 - DNA, 15 bp, Homo sapiens
gagactcaaacagga

SEQ ID NO: 1914700 - DNA, 15 bp, Homo sapiens
agactcaaacaggac

SEQ ID NO: 1914701 - DNA, 15 bp, Homo sapiens
gactcaaacaggact

SEQ ID NO: 1914702 - DNA, 15 bp, Homo sapiens
actcaaacaggactg

SEQ ID NO: 1914703 - DNA, 15 bp, Homo sapiens
ctcaaacaggactgt

SEQ ID NO: 1914704 - DNA, 15 bp, Homo sapiens
tcaaacaggactgtg

SEQ ID NO: 1914705 - DNA, 15 bp, Homo sapiens
caaacaggactgtga

SEQ ID NO: 1914706 - DNA, 15 bp, Homo sapiens
aaacaggactgtgaa

SEQ ID NO: 1914707 - DNA, 15 bp, Homo sapiens
aacaggactgtgaac

SEQ ID NO: 1914708 - DNA, 15 bp, Homo sapiens
acaggactgtgaact

SEQ ID NO: 1914709 - DNA, 15 bp, Homo sapiens
caggactgtgaactt

SEQ ID NO: 1914710 - DNA, 15 bp, Homo sapiens
aggactgtgaacttc

SEQ ID NO: 1914711 - DNA, 15 bp, Homo sapiens
ggactgtgaacttct

SEQ ID NO: 1914712 - DNA, 15 bp, Homo sapiens
gactgtgaacttctc

SEQ ID NO: 1914713 - DNA, 15 bp, Homo sapiens
actgtgaacttctcc

SEQ ID NO: 1914714 - DNA, 15 bp, Homo sapiens
ctgtgaacttctcct

SEQ ID NO: 1914715 - DNA, 15 bp, Homo sapiens
tgtgaacttctcctc

SEQ ID NO: 1914716 - DNA, 15 bp, Homo sapiens
gtgaacttctcctct

SEQ ID NO: 1914717 - DNA, 15 bp, Homo sapiens
tgaacttctcctctg

SEQ ID NO: 1914718 - DNA, 15 bp, Homo sapiens
gaacttctcctctgt

SEQ ID NO: 1914719 - DNA, 15 bp, Homo sapiens
aacttctcctctgtc

SEQ ID NO: 1914720 - DNA, 15 bp, Homo sapiens
acttctcctctgtca

SEQ ID NO: 1914721 - DNA, 15 bp, Homo sapiens
cttctcctctgtcac

SEQ ID NO: 1914722 - DNA, 15 bp, Homo sapiens
ttctcctctgtcacg

SEQ ID NO: 1914723 - DNA, 15 bp, Homo sapiens
tctcctctgtcacgg

SEQ ID NO: 1914724 - DNA, 15 bp, Homo sapiens
ctcctctgtcacgga

SEQ ID NO: 1914725 - DNA, 15 bp, Homo sapiens
tcctctgtcacggac

SEQ ID NO: 1914726 - DNA, 15 bp, Homo sapiens
cctctgtcacggact

SEQ ID NO: 1914727 - DNA, 15 bp, Homo sapiens
ctctgtcacggactc

SEQ ID NO: 1914728 - DNA, 15 bp, Homo sapiens
tctgtcacggactct

SEQ ID NO: 1914729 - DNA, 15 bp, Homo sapiens
ctgtcacggactctg

SEQ ID NO: 1914730 - DNA, 15 bp, Homo sapiens
tgtcacggactctgc

SEQ ID NO: 1914731 - DNA, 15 bp, Homo sapiens
gtcacggactctgca

SEQ ID NO: 1914732 - DNA, 15 bp, Homo sapiens
tcacggactctgcac

SEQ ID NO: 1914733 - DNA, 15 bp, Homo sapiens
cacggactctgcacc

SEQ ID NO: 1914734 - DNA, 15 bp, Homo sapiens
acggactctgcaccc

SEQ ID NO: 1914735 - DNA, 15 bp, Homo sapiens
cggactctgcacccc

SEQ ID NO: 1914736 - DNA, 15 bp, Homo sapiens
ggactctgcaccccg

SEQ ID NO: 1914737 - DNA, 15 bp, Homo sapiens
gactctgcaccccgc

SEQ ID NO: 1914738 - DNA, 15 bp, Homo sapiens
actctgcaccccgcc

SEQ ID NO: 1914739 - DNA, 15 bp, Homo sapiens
ctctgcaccccgccg

SEQ ID NO: 1914740 - DNA, 15 bp, Homo sapiens
tctgcaccccgccgg

SEQ ID NO: 1914741 - DNA, 15 bp, Homo sapiens
ctgcaccccgccggt

SEQ ID NO: 1914742 - DNA, 15 bp, Homo sapiens
tgcaccccgccggtc

SEQ ID NO: 1914743 - DNA, 15 bp, Homo sapiens
gcaccccgccggtca

SEQ ID NO: 1914744 - DNA, 15 bp, Homo sapiens
caccccgccggtcag

SEQ ID NO: 1914745 - DNA, 15 bp, Homo sapiens
accccgccggtcagc

SEQ ID NO: 1914746 - DNA, 15 bp, Homo sapiens
ccccgccggtcagca

SEQ ID NO: 1914747 - DNA, 15 bp, Homo sapiens
cccgccggtcagcac

SEQ ID NO: 1914748 - DNA, 15 bp, Homo sapiens
ccgccggtcagcacg

SEQ ID NO: 1914749 - DNA, 15 bp, Homo sapiens
cgccggtcagcacgc

SEQ ID NO: 1914750 - DNA, 15 bp, Homo sapiens
gccggtcagcacgct

SEQ ID NO: 1914751 - DNA, 15 bp, Homo sapiens
ccggtcagcacgctt

SEQ ID NO: 1914752 - DNA, 15 bp, Homo sapiens
cggtcagcacgcttg

SEQ ID NO: 1914753 - DNA, 15 bp, Homo sapiens
ggtcagcacgcttga

SEQ ID NO: 1914754 - DNA, 15 bp, Homo sapiens
gtcagcacgcttgat

SEQ ID NO: 1914755 - DNA, 15 bp, Homo sapiens
tcagcacgcttgatc

SEQ ID NO: 1914756 - DNA, 15 bp, Homo sapiens
cagcacgcttgatcc

SEQ ID NO: 1914757 - DNA, 15 bp, Homo sapiens
agcacgcttgatcct

SEQ ID NO: 1914758 - DNA, 15 bp, Homo sapiens
gcacgcttgatcctc

SEQ ID NO: 1914759 - DNA, 15 bp, Homo sapiens
cacgcttgatcctct

SEQ ID NO: 1914760 - DNA, 15 bp, Homo sapiens
acgcttgatcctctt

SEQ ID NO: 1914761 - DNA, 15 bp, Homo sapiens
cgcttgatcctcttc

SEQ ID NO: 1914762 - DNA, 15 bp, Homo sapiens
gcttgatcctcttca

SEQ ID NO: 1914763 - DNA, 15 bp, Homo sapiens
cttgatcctcttcag

SEQ ID NO: 1914764 - DNA, 15 bp, Homo sapiens
ttgatcctcttcagt

SEQ ID NO: 1914765 - DNA, 15 bp, Homo sapiens
tgatcctcttcagtg

SEQ ID NO: 1914766 - DNA, 15 bp, Homo sapiens
gatcctcttcagtga

SEQ ID NO: 1914767 - DNA, 15 bp, Homo sapiens
atcctcttcagtgac

SEQ ID NO: 1914768 - DNA, 15 bp, Homo sapiens
tcctcttcagtgact

SEQ ID NO: 1914769 - DNA, 15 bp, Homo sapiens
cctcttcagtgactg

SEQ ID NO: 1914770 - DNA, 15 bp, Homo sapiens
ctcttcagtgactgc

SEQ ID NO: 1914771 - DNA, 15 bp, Homo sapiens
tcttcagtgactgca

SEQ ID NO: 1914772 - DNA, 15 bp, Homo sapiens
cttcagtgactgcag

SEQ ID NO: 1914773 - DNA, 15 bp, Homo sapiens
ttcagtgactgcagg

SEQ ID NO: 1914774 - DNA, 15 bp, Homo sapiens
tcagtgactgcaggg

SEQ ID NO: 1914775 - DNA, 15 bp, Homo sapiens
cagtgactgcagggt

SEQ ID NO: 1914776 - DNA, 15 bp, Homo sapiens
agtgactgcagggtg

SEQ ID NO: 1914777 - DNA, 15 bp, Homo sapiens
gtgactgcagggtgg

SEQ ID NO: 1914778 - DNA, 15 bp, Homo sapiens
tgactgcagggtggg

SEQ ID NO: 1914779 - DNA, 15 bp, Homo sapiens
gactgcagggtggga

SEQ ID NO: 1914780 - DNA, 15 bp, Homo sapiens
actgcagggtgggag

SEQ ID NO: 1914781 - DNA, 15 bp, Homo sapiens
ctgcagggtgggagg

SEQ ID NO: 1914782 - DNA, 15 bp, Homo sapiens
tgcagggtgggaggt

SEQ ID NO: 1914783 - DNA, 15 bp, Homo sapiens
cagggtgggaggtga

SEQ ID NO: 1914784 - DNA, 15 bp, Homo sapiens
agggtgggaggtgac

SEQ ID NO: 1914785 - DNA, 15 bp, Homo sapiens
gggtgggaggtgaca

SEQ ID NO: 1914786 - DNA, 15 bp, Homo sapiens
ggtgggaggtgacag

SEQ ID NO: 1914787 - DNA, 15 bp, Homo sapiens
gtgggaggtgacagg

SEQ ID NO: 1914788 - DNA, 15 bp, Homo sapiens
tgggaggtgacaggg

SEQ ID NO: 1914789 - DNA, 15 bp, Homo sapiens
gggaggtgacagggg

SEQ ID NO: 1914790 - DNA, 15 bp, Homo sapiens
ggaggtgacagggga

SEQ ID NO: 1914791 - DNA, 15 bp, Homo sapiens
gaggtgacaggggaa

SEQ ID NO: 1914792 - DNA, 15 bp, Homo sapiens
aggtgacaggggaac

SEQ ID NO: 1914793 - DNA, 15 bp, Homo sapiens
ggtgacaggggaaca

SEQ ID NO: 1914794 - DNA, 15 bp, Homo sapiens
gtgacaggggaacag

SEQ ID NO: 1914795 - DNA, 15 bp, Homo sapiens
tgacaggggaacagg

SEQ ID NO: 1914796 - DNA, 15 bp, Homo sapiens
gacaggggaacaggg

SEQ ID NO: 1914797 - DNA, 15 bp, Homo sapiens
acaggggaacaggga

SEQ ID NO: 1914798 - DNA, 15 bp, Homo sapiens
caggggaacagggag

SEQ ID NO: 1914799 - DNA, 15 bp, Homo sapiens
aggggaacagggaga

SEQ ID NO: 1914800 - DNA, 15 bp, Homo sapiens
ggggaacagggagat

SEQ ID NO: 1914801 - DNA, 15 bp, Homo sapiens
gggaacagggagatg

SEQ ID NO: 1914802 - DNA, 15 bp, Homo sapiens
ggaacagggagatgg

SEQ ID NO: 1914803 - DNA, 15 bp, Homo sapiens
gaacagggagatggc

SEQ ID NO: 1914804 - DNA, 15 bp, Homo sapiens
aacagggagatggcg

SEQ ID NO: 1914805 - DNA, 15 bp, Homo sapiens
acagggagatggcgg

SEQ ID NO: 1914806 - DNA, 15 bp, Homo sapiens
cagggagatggcggc

SEQ ID NO: 1914807 - DNA, 15 bp, Homo sapiens
agggagatggcggct

SEQ ID NO: 1914808 - DNA, 15 bp, Homo sapiens
gggagatggcggctg

SEQ ID NO: 1914809 - DNA, 15 bp, Homo sapiens
ggagatggcggctgc

SEQ ID NO: 1914810 - DNA, 15 bp, Homo sapiens
gagatggcggctgct

SEQ ID NO: 1914811 - DNA, 15 bp, Homo sapiens
agatggcggctgctt

SEQ ID NO: 1914812 - DNA, 15 bp, Homo sapiens
gatggcggctgctta

SEQ ID NO: 1914813 - DNA, 15 bp, Homo sapiens
atggcggctgcttac

SEQ ID NO: 1914814 - DNA, 15 bp, Homo sapiens
tggcggctgcttaca

SEQ ID NO: 1914815 - DNA, 15 bp, Homo sapiens
ggcggctgcttacaa

SEQ ID NO: 1914816 - DNA, 15 bp, Homo sapiens
gcggctgcttacaag

SEQ ID NO: 1914817 - DNA, 15 bp, Homo sapiens
cggctgcttacaagg

SEQ ID NO: 1914818 - DNA, 15 bp, Homo sapiens
ggctgcttacaagga

SEQ ID NO: 1914819 - DNA, 15 bp, Homo sapiens
gctgcttacaaggac

SEQ ID NO: 1914820 - DNA, 15 bp, Homo sapiens
ctgcttacaaggact

SEQ ID NO: 1914821 - DNA, 15 bp, Homo sapiens
tgcttacaaggactc

SEQ ID NO: 1914822 - DNA, 15 bp, Homo sapiens
gcttacaaggactca

SEQ ID NO: 1914823 - DNA, 15 bp, Homo sapiens
cttacaaggactcag

SEQ ID NO: 1914824 - DNA, 15 bp, Homo sapiens
ttacaaggactcagc

SEQ ID NO: 1914825 - DNA, 15 bp, Homo sapiens
tacaaggactcagct

SEQ ID NO: 1914826 - DNA, 15 bp, Homo sapiens
acaaggactcagctc

SEQ ID NO: 1914827 - DNA, 15 bp, Homo sapiens
caaggactcagctct

SEQ ID NO: 1914828 - DNA, 15 bp, Homo sapiens
aaggactcagctctg

SEQ ID NO: 1914829 - DNA, 15 bp, Homo sapiens
aggactcagctctgg

SEQ ID NO: 1914830 - DNA, 15 bp, Homo sapiens
ggactcagctctggg

SEQ ID NO: 1914831 - DNA, 15 bp, Homo sapiens
gactcagctctgggc

SEQ ID NO: 1914832 - DNA, 15 bp, Homo sapiens
actcagctctgggca

SEQ ID NO: 1914833 - DNA, 15 bp, Homo sapiens
ctcagctctgggcag

SEQ ID NO: 1914834 - DNA, 15 bp, Homo sapiens
tcagctctgggcaga

SEQ ID NO: 1914835 - DNA, 15 bp, Homo sapiens
cagctctgggcagac

SEQ ID NO: 1914836 - DNA, 15 bp, Homo sapiens
agctctgggcagacc

SEQ ID NO: 1914837 - DNA, 15 bp, Homo sapiens
gctctgggcagacct

SEQ ID NO: 1914838 - DNA, 15 bp, Homo sapiens
ctctgggcagacctg

SEQ ID NO: 1914839 - DNA, 15 bp, Homo sapiens
tctgggcagacctgc

SEQ ID NO: 1914840 - DNA, 15 bp, Homo sapiens
ctgggcagacctgcc

SEQ ID NO: 1914841 - DNA, 15 bp, Homo sapiens
tgggcagacctgccc

SEQ ID NO: 1914842 - DNA, 15 bp, Homo sapiens
gggcagacctgccct

SEQ ID NO: 1914843 - DNA, 15 bp, Homo sapiens
ggcagacctgccctc

SEQ ID NO: 1914844 - DNA, 15 bp, Homo sapiens
gcagacctgccctcc

SEQ ID NO: 1914845 - DNA, 15 bp, Homo sapiens
cagacctgccctccg

SEQ ID NO: 1914846 - DNA, 15 bp, Homo sapiens
agacctgccctccga

SEQ ID NO: 1914847 - DNA, 15 bp, Homo sapiens
gacctgccctccgag

SEQ ID NO: 1914848 - DNA, 15 bp, Homo sapiens
acctgccctccgagg

SEQ ID NO: 1914849 - DNA, 15 bp, Homo sapiens
cctgccctccgaggg

SEQ ID NO: 1914850 - DNA, 15 bp, Homo sapiens
ctgccctccgagggt

SEQ ID NO: 1914851 - DNA, 15 bp, Homo sapiens
tgccctccgagggtg

SEQ ID NO: 1914852 - DNA, 15 bp, Homo sapiens
gccctccgagggtgg

SEQ ID NO: 1914853 - DNA, 15 bp, Homo sapiens
ccctccgagggtggg

SEQ ID NO: 1914854 - DNA, 15 bp, Homo sapiens
cctccgagggtgggc

SEQ ID NO: 1914855 - DNA, 15 bp, Homo sapiens
ctccgagggtgggcc

SEQ ID NO: 1914856 - DNA, 15 bp, Homo sapiens
tccgagggtgggccc

SEQ ID NO: 1914857 - DNA, 15 bp, Homo sapiens
ccgagggtgggcccc

SEQ ID NO: 1914858 - DNA, 15 bp, Homo sapiens
cgagggtgggccccg

SEQ ID NO: 1914859 - DNA, 15 bp, Homo sapiens
gagggtgggccccgt

SEQ ID NO: 1914860 - DNA, 15 bp, Homo sapiens
agggtgggccccgtc

SEQ ID NO: 1914861 - DNA, 15 bp, Homo sapiens
gggtgggccccgtcc

SEQ ID NO: 1914862 - DNA, 15 bp, Homo sapiens
ggtgggccccgtcct

SEQ ID NO: 1914863 - DNA, 15 bp, Homo sapiens
gtgggccccgtcctc

SEQ ID NO: 1914864 - DNA, 15 bp, Homo sapiens
tgggccccgtcctca

SEQ ID NO: 1914865 - DNA, 15 bp, Homo sapiens
gggccccgtcctcac

SEQ ID NO: 1914866 - DNA, 15 bp, Homo sapiens
ggccccgtcctcacc

SEQ ID NO: 1914867 - DNA, 15 bp, Homo sapiens
gccccgtcctcacca

SEQ ID NO: 1914868 - DNA, 15 bp, Homo sapiens
ccccgtcctcaccat

SEQ ID NO: 1914869 - DNA, 15 bp, Homo sapiens
cccgtcctcaccatg

SEQ ID NO: 1914870 - DNA, 15 bp, Homo sapiens
ccgtcctcaccatgt

SEQ ID NO: 1914871 - DNA, 15 bp, Homo sapiens
cgtcctcaccatgtt

SEQ ID NO: 1914872 - DNA, 15 bp, Homo sapiens
gtcctcaccatgttc

SEQ ID NO: 1914873 - DNA, 15 bp, Homo sapiens
tcctcaccatgttcc

SEQ ID NO: 1914874 - DNA, 15 bp, Homo sapiens
cctcaccatgttcct

SEQ ID NO: 1914875 - DNA, 15 bp, Homo sapiens
ctcaccatgttcctg

SEQ ID NO: 1914876 - DNA, 15 bp, Homo sapiens
tcaccatgttcctga

SEQ ID NO: 1914877 - DNA, 15 bp, Homo sapiens
caccatgttcctgaa

SEQ ID NO: 1914878 - DNA, 15 bp, Homo sapiens
accatgttcctgaag

SEQ ID NO: 1914879 - DNA, 15 bp, Homo sapiens
ccatgttcctgaagt

SEQ ID NO: 1914880 - DNA, 15 bp, Homo sapiens
catgttcctgaagtg

SEQ ID NO: 1914881 - DNA, 15 bp, Homo sapiens
atgttcctgaagtgg

SEQ ID NO: 1914882 - DNA, 15 bp, Homo sapiens
tgttcctgaagtggg

SEQ ID NO: 1914883 - DNA, 15 bp, Homo sapiens
gttcctgaagtgggc

SEQ ID NO: 1914884 - DNA, 15 bp, Homo sapiens
ttcctgaagtgggca

SEQ ID NO: 1914885 - DNA, 15 bp, Homo sapiens
tcctgaagtgggcac

SEQ ID NO: 1914886 - DNA, 15 bp, Homo sapiens
cctgaagtgggcact

SEQ ID NO: 1914887 - DNA, 15 bp, Homo sapiens
ctgaagtgggcactg

SEQ ID NO: 1914888 - DNA, 15 bp, Homo sapiens
tgaagtgggcactga

SEQ ID NO: 1914889 - DNA, 15 bp, Homo sapiens
gaagtgggcactgag

SEQ ID NO: 1914890 - DNA, 15 bp, Homo sapiens
aagtgggcactgagg

SEQ ID NO: 1914891 - DNA, 15 bp, Homo sapiens
agtgggcactgaggg

SEQ ID NO: 1914892 - DNA, 15 bp, Homo sapiens
gtgggcactgagggt

SEQ ID NO: 1914893 - DNA, 15 bp, Homo sapiens
tgggcactgagggtg

SEQ ID NO: 1914894 - DNA, 15 bp, Homo sapiens
gggcactgagggtgc

SEQ ID NO: 1914895 - DNA, 15 bp, Homo sapiens
ggcactgagggtgcc

SEQ ID NO: 1914896 - DNA, 15 bp, Homo sapiens
gcactgagggtgccc

SEQ ID NO: 1914897 - DNA, 15 bp, Homo sapiens
cactgagggtgcccg

SEQ ID NO: 1914898 - DNA, 15 bp, Homo sapiens
actgagggtgcccgt

SEQ ID NO: 1914899 - DNA, 15 bp, Homo sapiens
ctgagggtgcccgtg

SEQ ID NO: 1914900 - DNA, 15 bp, Homo sapiens
tgagggtgcccgtgg

SEQ ID NO: 1914901 - DNA, 15 bp, Homo sapiens
gagggtgcccgtggc

SEQ ID NO: 1914902 - DNA, 15 bp, Homo sapiens
agggtgcccgtggct

SEQ ID NO: 1914903 - DNA, 15 bp, Homo sapiens
gggtgcccgtggctt

SEQ ID NO: 1914904 - DNA, 15 bp, Homo sapiens
ggtgcccgtggcttg

SEQ ID NO: 1914905 - DNA, 15 bp, Homo sapiens
gtgcccgtggcttgg

SEQ ID NO: 1914906 - DNA, 15 bp, Homo sapiens
tgcccgtggcttggt

SEQ ID NO: 1914907 - DNA, 15 bp, Homo sapiens
gcccgtggcttggtg

SEQ ID NO: 1914908 - DNA, 15 bp, Homo sapiens
cccgtggcttggtgg

SEQ ID NO: 1914909 - DNA, 15 bp, Homo sapiens
ccgtggcttggtggt

SEQ ID NO: 1914910 - DNA, 15 bp, Homo sapiens
cgtggcttggtggta

SEQ ID NO: 1914911 - DNA, 15 bp, Homo sapiens
gtggcttggtggtac

SEQ ID NO: 1914912 - DNA, 15 bp, Homo sapiens
tggcttggtggtact

SEQ ID NO: 1914913 - DNA, 15 bp, Homo sapiens
ggcttggtggtactc

SEQ ID NO: 1914914 - DNA, 15 bp, Homo sapiens
gcttggtggtactcc

SEQ ID NO: 1914915 - DNA, 15 bp, Homo sapiens
cttggtggtactcca

SEQ ID NO: 1914916 - DNA, 15 bp, Homo sapiens
ttggtggtactccat

SEQ ID NO: 1914917 - DNA, 15 bp, Homo sapiens
tggtggtactccatc

SEQ ID NO: 1914918 - DNA, 15 bp, Homo sapiens
ggtggtactccatca

SEQ ID NO: 1914919 - DNA, 15 bp, Homo sapiens
gtggtactccatcac

SEQ ID NO: 1914920 - DNA, 15 bp, Homo sapiens
tggtactccatcacg

SEQ ID NO: 1914921 - DNA, 15 bp, Homo sapiens
ggtactccatcacgc

SEQ ID NO: 1914922 - DNA, 15 bp, Homo sapiens
gtactccatcacgca

SEQ ID NO: 1914923 - DNA, 15 bp, Homo sapiens
tactccatcacgcag

SEQ ID NO: 1914924 - DNA, 15 bp, Homo sapiens
actccatcacgcagc

SEQ ID NO: 1914925 - DNA, 15 bp, Homo sapiens
ctccatcacgcagca

SEQ ID NO: 1914926 - DNA, 15 bp, Homo sapiens
tccatcacgcagcag

SEQ ID NO: 1914927 - DNA, 15 bp, Homo sapiens
ccatcacgcagcagt

SEQ ID NO: 1914928 - DNA, 15 bp, Homo sapiens
catcacgcagcagtt

SEQ ID NO: 1914929 - DNA, 15 bp, Homo sapiens
atcacgcagcagttg

SEQ ID NO: 1914930 - DNA, 15 bp, Homo sapiens
tcacgcagcagttgt

SEQ ID NO: 1914931 - DNA, 15 bp, Homo sapiens
cacgcagcagttgtt

SEQ ID NO: 1914932 - DNA, 15 bp, Homo sapiens
acgcagcagttgttc

SEQ ID NO: 1914933 - DNA, 15 bp, Homo sapiens
cgcagcagttgttca

SEQ ID NO: 1914934 - DNA, 15 bp, Homo sapiens
gcagcagttgttcag

SEQ ID NO: 1914935 - DNA, 15 bp, Homo sapiens
cagcagttgttcagg

SEQ ID NO: 1914936 - DNA, 15 bp, Homo sapiens
agcagttgttcagga

SEQ ID NO: 1914937 - DNA, 15 bp, Homo sapiens
gcagttgttcaggat

SEQ ID NO: 1914938 - DNA, 15 bp, Homo sapiens
cagttgttcaggatc

SEQ ID NO: 1914939 - DNA, 15 bp, Homo sapiens
agttgttcaggatct

SEQ ID NO: 1914940 - DNA, 15 bp, Homo sapiens
gttgttcaggatctc

SEQ ID NO: 1914941 - DNA, 15 bp, Homo sapiens
ttgttcaggatctca

SEQ ID NO: 1914942 - DNA, 15 bp, Homo sapiens
tgttcaggatctcac

SEQ ID NO: 1914943 - DNA, 15 bp, Homo sapiens
gttcaggatctcacc

SEQ ID NO: 1914944 - DNA, 15 bp, Homo sapiens
ttcaggatctcacca

SEQ ID NO: 1914945 - DNA, 15 bp, Homo sapiens
tcaggatctcaccac

SEQ ID NO: 1914946 - DNA, 15 bp, Homo sapiens
caggatctcaccact

SEQ ID NO: 1914947 - DNA, 15 bp, Homo sapiens
aggatctcaccactg

SEQ ID NO: 1914948 - DNA, 15 bp, Homo sapiens
ggatctcaccactgc

SEQ ID NO: 1914949 - DNA, 15 bp, Homo sapiens
gatctcaccactgca

SEQ ID NO: 1914950 - DNA, 15 bp, Homo sapiens
atctcaccactgcac
